United States Patent Application Publication US 2026/0258423 A1 - sequence listing, part 51

SEQ ID NO: 301568 - DNA, 83257441 bp, Homo sapiens (residues 25,617,685-27,752,491 of 83,257,441)
  source 1..83257441: mol_type = genomic DNA
catgcttttcgtagtgtctgcaagtggacatttggagcgctttcaggcctgtggtggaaaacgaattatggtcacataaaaactggagagaagccttctcagaaacttctctgtgatgattgcattcaactcacagagttgaaccctcctatggatagaacagtgttgaaactctctttttgtggaatctgcaagtggatatgtggacctctccgaagatgtctttggaaacgggaatatcttcacataaaaactaaacagaagcattctcagaaacttcttggtgatgtttgcattcaaatcccagcgttgaaccttcctttgatagttcaggtttgaaacactctttttgtaggatctgcaagtggctatttggaccactctgtggccttcgttcgaaacgggtatatcttcgcataaaatctagacagaagcattctcagaaaatactttgtgatgattgagtttaaatcacagagctgaccattcctttggatggagcaggtttgagacacactttttgtagaatctacaagtggatatttggacctctctgaggatttcgttggaaacgggataactgcacctaactaaacggaagcattctcagaaactgctttgtgatgattgcattcacctcacagagttgaacattcctattgatagagcagtttggaaacactcttgttgtggaatgtgcaagtggagatttggagcgctttgaggcctatggtagtaaagggaatagcttcatagaaaaaattgacagatgcattctcaggaactttttggtgatgtttgtattcaactcccagagttgaactttcctttggaaagagcagctatgaaacactctttttctagaatctggaagtggacgtttggagggctttgtggtttgtggtggaaaaggaaatatcttcacctaaatactagatagaagcattctcagaagcttctctgtgatgactgcattcaactcacggagttgaacactccttttgagagcgcagttttgaaactctctttctgtggcatctgcaaggggacatgtagacctctttgaagatttcgttggaaacggaatcatcttcacataaaaactatacagaagcagtctcagaatcttctttgtgatgtttgcattcaaatcccagagttgaactttcctttcaaagttcacgtttgaaacactctttttgcaggatctacaagtggatatttggaccactctgtgtccttcgttcgaaacgggtatatcttcacacgacatctagacagaagctttctcagaaaattctttgggatgattgagtggaactcacagagctgaacattccttgcgatgtggcagtttagaaacacactttctgcagaatctgcaagtgcatatttggacctctctgaggaattcgttggaaacgggataatttcagctgactaaacagaagcattctcagaaccttcttcgtgatgtctgcattcaactcacagtgtggaacctttctttgatagttcaggtttgaaacactctttttgtagaaactgcaaggggataattgcacttctttgaggcctaccgtagtaaaggaaataacttcctatagaaagaagacagaagcattctcagaaccctcttcgtgacgtttgcattcaactcacagtgctgaacctttctttgatagttcagctttgaaacactcttcttgtagaaactgcaagtggatatttggtcctctctgaggatttcgttggaaacgggataaaccgcacagaactaaacagaagcattctcagagccctcttcgtgatgtttgcattcaactcacagtgctgaacctttctttgatagtgcagctttgaaacactctttttgtagaaactgcaagtggatgtttggtcctctctgaggatttcgttggaaacgggataaaccgcacagaactaaaacagaagcattgtcagaaacttctttgtgatgattgcattcaactcacagagttgaaggttccttttcaaacagcagtttccaatcactctttctgtggaatctgcaagtggatatttgggcctctctgaggatttcgttggaaacgggataaaacgcacagaactaaaacagaagcattctcagaaacttctctgtgatgtttgtgttcaactcccagagtttcacgttgcttttcatagagtagttctgaaacatgcttttcgtagtgtctgcaagtggacatttggagcgctttcaggcctgtggtggaaaacgaattatggtcacataaaaactggagagaagccttctcaggaaacttctctgtgatgattgcattcaactcacagagttgaaccctcctatggatagagcagtgttgaaactctctttttgtggaatctgcaagtggatatgtggacctctccgaagatgtctttggaaacgggaatatcttcacataaaaactaaacagaagcattctcagaaacttcttggtgatgtttgcattcaaatcccagagttgaaccttcctttgatagttcaggtttgaaacactctttttgtaggatctgcaagtggatatttggaccactctgtggccttcgttcgaaacgggtatatcttcgcataaaatctagacagaagcattctcagaaaatactttgtgatgattgagtttaactcacagagctgaacattcctttggatggagcaggcttgagacacactttttgtagaatccacaagtggatatttggacctctctgaggatttcgttggaaacgggataactgcaccgaactaaacggaagcattctcagaaactgctttgtgatgattgcattcacctcacagagttgaacattcctattgatagagcagtttggaaacactcttgttgtggaatgtgcaagtggagatttggagcgctttgaggcctatggtagtaaagggaatagcttcatagaaaaactagacagatgcattttcaggaactttttggtgatgtttgtattcaactcccagagttgaactttcctttggaaagagcagctatgaaacactctttttctagaatctgcaagtggacgtttggagggctttgtggtttgtggtggaaaaggaaatatcttcacctaaatactagagagaagcattctcagaagcttctctgtgatgactgcattcaactcacggagttgaacactccttttgagagcgcacttttgaaactctctttctgtggcatctgcaaggggacatgtagacctctttgaagatttcgttggaaacggaatcatcttcacataaaaactatacagaagcagtctcagaatcttctttgtgatgtttgcattcaaatcccagagttgaactttcctttcaaagttcacgtttgaaacactctttttgcaggatctacaagtggatatttggaccactctgtgtccttcgttcgagacgggtatatcttcacacgacatctagacagaagctttctcagaaaattctttgggatgattgagttgaactcacagagctgaacattccttgcgatgtagcagtttagaaacacactttctgcagaatctgcaagtgcatatttagacctctctgaggaattcgttggaaacgggataatttcagctgactaaacagaagcattctcagaaccttcttcgtgatgtctgcattcaactcacagtgtggaacctttctttgatagttcaggtttgaaacactctttttgtagaaactgcaaggggataattgcacttctttgaggcctaccgtagcaaaagaaataacttcctataaaaagaagacagaagcattctcagaaccttcttcgtgatgtttgcattcaactcacagtgctgaacctttctttgatagttcagctttgaaacactctttttgtagaaacagcaagtggatatttcgtcctctctgaggatttcgttggaaacgggataaaccgcacagaactaaacagaagcattcacagaaaactcttggtgacgactgagtttaactcacagagctgaacattcctttggatggagcagtttcgaaacacactatttgtagaatgtgcaagtggatatgtgggcctctctgaggatttcgttggaaacgggataaaccgcacagaactaaacagaagcattctcagaaactactttgtgatgattgcattcaagtcacagagttgaacattccctttgacagagcagtttggaaactctctttgtgtagaatctgcaagtggagatatggaccgctttgaggcctatggtagtaaaggaaatagcttcatataaaagctagacagtagcattctcagaaacttctttgtgatgcttgcattcaactcacagagttgaactttcctttcgagagagaagccttgaaacactctttttccagaatctgcaagtggacatttggagggctttgaggcctgtggtggaaaaggaattatcttcccgtaaaagctagatagaagcattgtcagaaacttctttgtgatgattgcattcaactcacagagttgaaggttccttttcaaagagcagtttccaatcactctttctgtggaatctgcaagtggatatttggacctctttgaagatttcgttggaaacgggagaatcttcacagaaaagctaaacagaagcattctcagaaacttctctgtgatgtttgtgttcaactcccagagtttcacattgcttttcatagagtagttctgaaacatgcttttcgtagtgtctacaagtggacatttggagcgctttcaggcctgtggtggaaaacgaattatggtcacataaaaactggagagaagccttctcagaaacttctctgtgatgattgcattcaactcacagagttgaaccctcctatggatagagcagtgttgaaactctctttttgtggaatctgcaagtggatatgtggacctctccgaagatgtctttggaaacgggaatatcttcacataaaaactaaacagaagcattctcagaaacttcttggtgatgtttgcattcaaatcccagagttgaaccttcctttgatagttcaggtttgaaacactctttttgtaggatctgcaagtggatatttggaccactctgtggccttcgttcgaaacgggtatatcttcgcataaaatctagacagaagcattctcagaaaatactttgtgatgattgagtttaactcacagagctgaacatttctttggatggagcaggtttgagacacaccttttgtagaatctacaagtggatatttggacctctctgaggatttcgttggaaacgggataactgcacctaactaaacggaagcattctcagaaactgctttgtgatgattgcattcacctcacagagttgaacattcctattgatagagcagtttggaaacactcttgttgtggaatgtgcaagtggagatttggagcgctttgaggcctatggtagtaaagggaatagcttcatagaaaaactagacagatgcattctcaggaactttttggtgatgtttgtattcaactcccagagttgaactttcctttggaaagagcagctatgaaacactctttttctagaatctgcaagtggacgtttggagggctttgtggtttgtggtggaaaaggaaatatcttcacttaaatactagatagaagcattctcagaagcttctctgtgatgactgcattcaactcacggagttgaacactccttttgagagcgcagttttgaaactctctttctgtggcatccgcaaggggacatgtggacctctttgaaggtttcgttggaaacggaatcatcttcacataaaaactatacagaagcagtctcagaatcttctttgtgatgtttgcattcaaatcccagagttgaacttgcctttcaaagttcacgtttgaaacactctttttgcaggatctacaagtggatatttggaccactctgtgtccttcgttcgaaacgggtatatcttcacatgacatctagacagaagctttctcagaaaattctttgggatgattgagtggaactcacagagctgaacattccttgcgatgtagcagtttagaaacacactttctgcagaatctgcaagtgcatatttggacctctctgaggaattcgttggatacgggataatttcagctgactaaacagaagcattctcagaaccttcttcgtgatgtctgcattcaactcacagtgtggaacctttctttgatagttcaggtttgaaacactctttttgtagaaactgcaaggggataattgcacttctttgaggcctaccgtagtaaaggaaataacttcctatagaaagaagacagaagcattctcagaaccctcttcgtgatgtttgcattcaactcacagtgctgaacctttctttgatagttcagctttgaaacactcttcttgtagaaactgcaagtggatatttggtcctctctgaggatttcgttggaaacgggataaaccgcacagaactaaacagaagaattctcagagccctattcgtgatgtttgcattcaactcacagtgctgaacctttctttgatagtgcagctttgaaacactctttttgtagaaactgcaagtcgatatttggtcctctctgaggatttcgttggaaacgggataaaccgcacagaactaaaacagaagcattcacagaaaactcttggtgacgactgagtttaactcacagagctgaacattcctttggatggagcagtttcgaaacacactatttgtagaatctgcaagtggatatttgggcctctctgaggatttcgttggaaacgggataaaccgcacagaactaaaacagaagcattctcagaaactactttgtgatgattgcattcaagtcacagagttgaacattccctttgacagagcagtttggaaactctctttgtgtagaatctgcaagtggagatatggaccgctttgaggcctatggtagtaaaggaaatagcttcatataaaagctagacagtagcattctcagaaacttctttgtgatgcttgcattcaactcacagagttgaactttcctttcgagagagaagctttgaaacactctttttccagaatctgcaagtggacatttggagggctttgaggcctgtggtggaaaaggaattaacttcccgtaaaagctagatagaagcattgtcagaaacttctttgtgatgattgcattcaactcacggagatgaaggttcctttacaaacagcagtttccaaacactctttctgtggaatctgcaagtggatatttggacctctttgaagatttcgttggaaacgggagaatcttcacagaaaatctaaacagaagcattctcagaaacttctctgtgatgtttgtgttcaactcccagagtgtcacattgcttttcatagagtagttctgaaacgtgcttttcgtagtgtctgcaagtggacatttggagcgctttcaggcctgtggtggaaaacgaattatggtcacataaaaactggagagaagccttctcagaaacttctctgtgatgattgcattcaactcacagagttgaaccctcctatggatagagcagtgttgaaactctctttttgtggaatctgcaagtggatatgtggacctctccgaagatgtctttggaaacgggaatatcttcacataaaaactacacagaagcattctcagaaacttcttggtgatgtttgcattcacatcgcagagttgatccttcctttgatagttcaggtttgaaacactctttttgtaggatctgcaagtggatatttggaccactctgtggccttcgttcgaaacgggtacatcttcgcataaaatctagacagaagcattctcagaaaatactttgtgatgattgagtttaactcacagagctgaacattcctttggatggagcaggttcgagacacactttttgtaggatctacaagtggatatttggacctctctgaggatttcgttggaaacgggataactgcaccgaactaaacggaagcattctcagaaactgctttgtgatgattgcattcacctcacagagttgaacattcctattgatagagcagtttggaaacactcttgttgtggaatgtgcaagtggagatttggagcgctttgaggcctatggtagtaaagggaatagcttcatagaaaaactagacagatgcattctcaggaactttttggtgatgtttgtattcaactcccagagttgaactttcctttggaaagagcagctatgaaacactctttttctagaatctgcaagtggacgtttggagggctttgtggtttgtggtggaaaaggaaatatcttcacctaaatactaggatagaagcatcctcagaagcttttctgtgatgactgcattcaactcacggagttgaacactccttttgagagcgcagttttgaaactctctttctgtggcatccgcaaggggacatgtggacctctttgaagatttcgttggaaacggaatcatcttcacataaaaattatacagaagcagtctcagaatcttctttgtgatgtttgcattcaaatccccgagttgaactttcctttcaaagttcacgtttgaaacactctttttgcaggatctacaagtggatatttggaccactctgtgtccttcgttcgaaacgggtatatcttcacatgacatctagacagaagctttctcagaaaattctttgggatgattgagttgaactcacagagctgagcattccttgcgatgtagcagtttagaaacacactttctgcagaatctgcaagtgcatatttggacctctgtgaggaattcgttggaaacgggataatttcagctgactaaacagaagcattctcagaaccttcttcatgatgtctgcattcaactcacagtgtggaacctttctttgatagttcaggtttgaaacactctttttgtagaaactgcaaggggataattgcactctttgaggagtaccgtagtaaaggaaataacttcctataaaaagaagacagaagcattctcagaaccctcttcgtgatgtttgcattcaactcacagtgctgaacctttctttgatagttcagctttgaaacactctttttgtagaaactgcaagtggatatttggtcctctctgaggatttcgttggaaacgggataaactgcacagaactaaacagaagcattctcagaaccttcttcgtgatgtttgcattcaactcacagtgttgaacctttctttgatagttcaggtttgaaacggtctttctgtagaaactgcaagtagatatttggacctctctgaggatttcgttggaaacgggataacccgcacagaactaaaacagaagcattcacagaaaactcttggtgacgactgagtttaactcacagagctgaacattcctttggatggagcagtttcgaaacacactatttgtagaatgtgcaagtggatatttaggcctctctgaggatttcgttggaaacgggataaaccgcacagaactaaacagaagcattctcagaaactactttgtgatgattgcattcaagtcacagagttgaacattccctttgacagagcagtttggaaactctctttgtgtagaatctgcaagtggagatatggaccgctttgaggcctatggtagtaaaggaaatagcttcatataaaacctagacagtagcattctcagaaacttctttgtgatgcttgcattcaactcacagagttgaactttcctttcgagagagaagctttgaaacactctttttccagaatgtgcaagtggacatttggggagctttgaggcctgtggaggaaaaggaattatcttcccgtaaaagctagatagaagcattgtcagaaacttctttgtgatgattgcattcaactcacagagttgaaggttccttttcaaacagcagtttccaatcactctttctgtggaatctgcaagtggatatttcgacctctttgaagatttcgttggaaacgggagaatcttcacagaaaagctaaacagaagcattctcagaaacttctctgtgatgtttgtgttcaactcccagagtttcacattgcttttcatagagtagttctgaaacatgcttttcgtagtgtctacaagtggacatttggagcgctttcaggcctgtggtggaaaacgaattatggtcacataaaaactggagagaagccttctcagaaacttctctgtgatgattgcattcaactcacagagttgaaccctcctatggatagagcagtgttgaaactctctttttgtggaatctgcaagtggatatgtggacctctccgaagatgtctttggaaacgggaatatcttcacataaaaactaaacagaagcattctcagaaacttcttggtgatgtttgcattcaaatcccagagttgaaccttcctttgatagttcaggtttgaaacactctttttgtaggatctgcaagtggatatttggaccactctgtggccttcgttcgaaacgggtacatcttcgcataaaatctagacagaagcattctcagaaaatactttgtgatgattgagtttaactcacagagctgaacattcctttggatggagcaggtttgagacacactttttgtagaatctacaagtggatatttggacctctctgaggatttcgttggaaacgggataactgcacctaactaaacggaagcattctcagaaactgcttgtgatgattgcattcaactcacagagttgaacattcctattgatagagcagtttggaaacactcttgttgtggaatgtgcaagtggagatttggagcgctttgaggcctatggtagtaaagggaatagcttcatagaaaaactagacagatgcattctcaggaactttttggtgatgtttgtattcaactcccagagttgaacttttcctttggaaagagcagctatgaaacactgtttttctagaatctgcaagtggacgtttggagggctttgtggtttgtggtggaaaaggaaatatcttcacctaaatactagatagaagcattctcagaagcttctctgtgatgactgcattcaactcacggagttgaacactccttttgagagcgcagttttgaaactctctttctgtggcatctgcaaggggacatgtagacctctttgaagatttcgttggaaacggaatcatcttcacataaaaactatacagaagcagtctcagaatcttctttgtgatgtttgcattcaaatcccagagttgaactttcctttcaaagttcacgtttgaagcactctttttgcaggatctacaagtggatatttggaccactctgtgtccttcgttcgaaacgggtatatcttcacatgacatctagacagaagctttctcagaaaattctttgggatgattgagttgagcaaacagagctgaacactccttgcgatgtagcagtttagaaacacactttctgcagaatctgcaagtgcatatgtggacctctctgaggaattcgttggaaatgggataatttcagctgactaaacagaagcattctcagaaccttcttcgtgatgtctgcattcaactcacagtgtggaacctttctttgatagttcaggtttgaaacactctttttgtagaaactgcaaggggatcattgcacttctttgaggcctaccgtagtaaaggagataagttcctataaaaagaagacagaagaattctcagagccctcttcgtgatgtttgcattcaactcacagtgctgaacctttctttgatagtgcagctttgaaacactctttttgtagaaactgcaagtggatgtttggtcctctctgaggatttcgttggaaacgggataaaccgcacagaactaaaacagagcattgtcagaaacttctttgtgatgattgcattcaactcacagagttgaaggttccttttcaaacagcagtttccaatcactctttctgtggaatctgcaagtggatatttgggcctctctgaggatttcgttggaaacgggataaaacgcacagaactaaaacagaagcattctcagaaacttctctgtgatgtttgtgttcaactcccagagtttcacgttgcttttcatagagtagttctgaaacatgcttttcgtagtgtctgcaagtggacatttggagcgctttcaggcctgtggtggaaaacgaattatggtcacataaaaactggagagaagccttctcagaaacttttctgtgatgattgcattcaactcacagagttgaaccctcctatggacagagcagtgttgaaactctctttttgtggaatctgcaagtggatatgtggacctctccgaagatgtctttggaaacgggaatatcttcacataaaaactaaacagaagcattctcagaaagttcttggtgatgtttgcattgcaatcccagagttgaaccttcctttgatagttcaggtttgaaacactctttttgtaggatctgcaagtggatatttggaccactctgtggccttcgttcgaaacgggtacatcttcgcataaaatctagagagaagcattctcagaaaatattttgtgatgattgagttgaactcacagagctgaacattcctttcgatggagcaggtttgaaacacactttttgtagaatctacaggtggatatttggacctctctgaagatttcgttggaaacgggataactgcacctaactaaacggaagcattgtcagaaactgctttgtgatgattgcattcacctcacagagttgaacattcctattgatagagcagtttggaaacactcttcttgtggaatgtgcaagtggagatttggagcgctttgaggcctatggtagtaaagggaatagcttcatagaaaaactagacagatgcattctcaggaactttttggtgatgtttgtattcaactcccagagttgaactttcctttgaaaagagcagctatgaaacactctttttctagaatctgcaagtggacgtttggaggtcttttttggtttgtggtggaaaaggaaatatcttcacctaaatactagatagaagcattctcagaagcttctctgtgatgactgcattcaactcacggagttgaacactccttttgagagcgcagttttgaatctctctttctgtggcatctgcaaggggacatgtagacctctttgaagatttcgttggaaacggaatcatcttcacataaaaactatacagaagcagtctcagaatcttcttggtgatgtttgcattcaaatcccataactgaactttcctttcaaagttcacgtttgaaacactctttttgcaggatctacaagtggatatttggaccactctgtgtccttcgttcgaaacgggtatatcttcacatgacatctagacagaagctttatcagaaaattctttgggatgattgagttgaactcacagagctgaacattccttgcgatgtagcagtttagaaacacactttctgcagaatctgcaagtgcatatttggacctctctgaggaattcgttggaaacgggataatttcagctgactaaacagaagcattctcagaaccttcttcgtgatgtctgcattcaactcacagtgtggaacctttctttgatagttcaggtttgaaacactctttttgtagaaactgcaaggggataattgcacttctttgaggcctaccgtagtaaaggaaataacttcctataaaaagaagacagaagcattctcagaaccctcttcgtgatgtttgcattcaactcacggtgctgaacctttctttgatagttcagctttgaaacactctttttgtagaaactgcaagtggatatttggtcctctctgaggatttcgttggaaacgggataaaccgcacagaactaaacagaagcattctcagaacattcttcgtgatgtttacattcaactcaaagggttgaacctttctttgatagttcaggtttgaaacggtctttctgtagaaactgcaagtagatatttggacctctctgaggatttcgttggaaacgggataaaccgcacagaactaaaacagaagcattcacagaaaactcttggtgacgactgagtttaactcacagagctgaacattcctttggatggagcagtttcgaaacacactatttctagaaggtgcaagtggatatgtgggcctctctgaggatttcgttggaaacgggataaaccgcacagaactaaacagaagcattctcagaaactactttgtgatgattgcattcaagtcacagagttgaacattccctttgacagagcagtttggaaactctctttgtgtagaatctgcaagtggagatatggaccgctttgaggcctatggtagtaaaggaaatagcttcatataaaagctagacagtagcattctcagaaacttctttgtgatgcttgcattcaactcacagagttgaactttcctttcgagagagaagctttgaaacactctttttccagaatctgcaagtggacatttggagggctttgaggcctgtggtggaaaaggaattatcttcctgtaaaagctagatagaagcattgtcagaaacttctttgtgatgattgcattcaactcacagagttgaaggttccttttcaaagagcagtttccaatcactctttctgtggaatctgcaagtggatatttggacctctttgaagatttcgttggaaacgggagaatcttcacagaaaagctaaacagaagcattctcagaaacttctctgtgatgtttgtgttcaactcccagagtttcacattgcttctcatagagtagttctgaaacatgcttttcgtagtgtctgcaagtggacatttggagcgctttcaggcctgtggtggaaaacgaattatggtcacatgaaaactggagagaagccttctcagaaacttctctgtgatgattgcattcaactcacagagttgaaccctcctatggatagagcagtgttgaaactctctttttgtggaatctgcaagcggatatgtggacctctccgaagatgtctttggaaacgggaatatcttcacataaaaactaaacagaagcattctcagaaacttcttggtgatgtttgcattcaaatcccagagttgaaccttcctttgagagttcaggtttgaaacactctttttgtaggatctgcaagtggatatttggaccactctgtggccttcgttcgaaacgggtacatcttcgcaaaaaatctagacagaagcattctcagaaaatactttgtgatgattgagtttaaatcacagagctgaccattcctttggatggagcaggtttgagacacactttttgtagaatctacaagtggatatttggacctctctgaggatttcgttggaaacgggataactgcacctaactaaacggaagcattctcagaaactgctttgtgatgattgcattcacctcacagagttgaacattcctattgatagagcagtttggaaacactcttgttgtggaatgtgcaagtggagatttggagcgctttgaggcctatggtagtaaagggaatagcttcatagaaaaactagacagatgcattctcaggaactttttggtgatgtttgtattcaactcccagagttgaactttcctttggaaagagcagctatgaaacactctttttctagaatctgcaagtggacgtttggagggctttgtggtttgtggtggaaaaggaaatatcttcacctaaatactagatagaagcattctcagaagcttctctgtgatgactgcattcaactcacggaattgaacactccttttgagagcgcagttttgaaactctctttctgtggcatctgcaaggggacatgtagacctctttgaagatttcgttggaaacggaatcatcttcacataaaaactatacagaagcagtctcagaatcttctttgtgatgtttgcattcaaatcccagagttgaactttcctttcaaagttcacgtttgaaatactctttttgcaggatctacaagtggatatttggaccactctgtggccttcgttcgaaacgggtatatcttcacatgacatctagacagaagctttctcagaaaattctttgggatgattgagttgaactcacagagctgagcattccttgcgatgtagcagtttagaaacacactttctgcagaatctgcaagtgcatatttggacctctgtgaggaattcgttggaaacgggataatttcagctgactaaacagaagcattctcagaaccttcttcgtgatgtctgcattcaactcacagtgtggaacctttctttgatagttcaggtttgaaacactctttttgtagaaactgcaaggggataattgcactctttgaggagtaccgtagtaaaggaaataacttcctataaaaagaagacagaagcattctcagaaccctcttcgtgatgtttgcattcaactcacagtgcgtgaacctttctttgatagttcagctttgaaacactcttcttgtagaaactgcaagtggatatttggtcctctctgaggatttcattggaaacgggataaaccgcacagaactaaacagaagcattctcagaaccttcttcgtgatgtttgcattcaactcacagtgttgaacctttctttgatagttcaggtttgaaacggtctttctgtagaaactgcaagtagatatttggacctctctgaggatttcgttggaaacgggataacccgcacagaactaaaacagaagcattcacagaaaactcttggtgacgactgagtttaactcacagagctgaacattcctttggatggagcagtttcgaaacacactatttgtagaatgtgcaagtggatatttaggcctctctgaggatttcgttggaaacgggataaaccgcacagaactaaacagaagcattctcagaaactactttgtgatgattgcattcaagtcacagagttgtacattccctttgacagagcagtttggaaactctctttgtgtagaatctgcaagtggagatatggaccgctttgaggcctatggtagtaaaggaaatagcttcatataaaagctagacagtggcattctcagaaacttctttgtaatgtttgcattcaactcacagagttgaactttccttttgagagacaagctttgaaacactctttctctagaatctgcaagtggatatttggagggatttgaggcctgtggtggaaagggaattatcttcccgtaaaaactagatggaagcattgtcagaaacttctttgtgatgattgcattcaactcacagagatgaaggttccttttcaaacagcagtttccaaacactctttctgtggaatctgcaagtggatatttggatctctttgaagatttcgttggaaacgggagaatcttcacagaaaagctaaacagaagcattctcagaaacttctctgtgatgtttgtgttcaactcccagaagtttcacattgcttttcatagagtagttctgaaacatgcttttcgtagtgtctgcaagtggacatttggagcgctttcaggcctgtggtgcaaaacgaattatggtcccataaaaactggaaagaagccttctcagaaacttctctgtgatgattgcattcaactcacaggtttgaaccctcctatggatagagcagtgttgaaactctctttttgtggaatctgcaagtggatatgtggacctctccgaagatgtctttggaaacgggaatatcttcacataaaaactaaacagaagcattctcagaaacttcttggtgatgtttgcattcaaatcccagagttgaaccttcctgtgatagttcaggtttgaaacactctttttgtaggatcttcaagtggatatttggaccactctgtggccttcgttcgaaacgggtacatcttcacataaaatctagacagaagcattctcagaaaatactttgtgatgattgagtttaactcacagagctgaacattcctttggatggagcaggtttgagacacactttttgtagaatctacaagtggatatttggacctctctgaggatttcgttggaaacgggataactgcacctaactaaacggaagcattctcagaaactgctttgtgatgattgcattcacctcacagagttgaacattcctattgatagagcagtttggaaacactcttgttgtggaatgtgcaagtggagatttggagcgctttgaggcctatggtagtaaagggaatagcttcatagaaaaactagacagatgcattctcaggaactttttggtgatgtttgtattcaactcccagagttgaactttcctttggaaagagcagctatgaaacactgtttctctagaatctgcaagtggacgtttggagggctttgtggtttgtggtggaaaaggaaatatcttcacctaaatactagatagaagcattctcagaagcttctctgtgatgactgcattcaactcacggagttgaacactccttttgagagcgcagttttgaaactctctttctgtggcatctgcaaggggacatgtagacctctttgaagatttcgttggaaacggaatcatcttcacataaaaactatacagaagcagtctcagaatcttctttgtgatgtttgcattcaaatcccagagttgaactttcctttcaaagttcacgtttgaaacactctttttgcaggatctacaagtggatatttggaccactctgtgtccttcgttcgaaacgggtatatcttcacatgacatctagacagaagctttctcagaaaattctttgggatgattgagtggaactcacagagctgaacattccttgcgatggagcagtttagaaacacactttctgcagaatctgcaagtgcatatttggacctctctgaggaattcgttggaaacgggataatttcagctgactaaacagaagcattctcagaaccttcttcgtgatgtctgcattcaactcacagtgtggaacctttctttgatagttcaggtttgaaacactctttttgtagaaactgcaaggggataattgcacttctttgaggcctaccgtagtaaaggaaataacttcctatagaaagaagacagaagcattctcagaaccctcttcgtgatgtttgcattcaactcacagtgctgaacctttctttgatagttcagctttgaaacactcttcttgtagaaactgcaagtggatatttggtcctctctgaggatttcgttggaaacgggataaaccgcacagaactaaacagaagcattctcagaaccttcttcgtgatgtttgcattcaaatcacagtgctgaacgtttctttgatagttcagctttgaaacactctttttgtagaaactgcaagtggatatttggtcctctgtgaggattttgttggaagcgggataaaccgcacagaactaaacagaagcattcacagaaaactcttggtgacgactgagtttaactcacagagctgaacatctctttggatggagcagtttcgaaacacactatttgtagaatgtgcaagtggatattggggcctctctgaggatttcgttggaaacgggataaaccgcacagaactaaacagaagcattctcagaaactactttgtgatgattgcattcaagtcacagagttgaacattccctttgacagagcagtttggaaactctctttgtgtagaatctgcaagtggagatatggaccactttgaggactatggtagtaaaggaaatagcttcatataaaagctaaacagtagcattctcagaaacttctttgtgatgcttgcattcaactcacagagttgaactttcctttcgagagagaagctttgaaacactctttttccagaatctgcaagtggacatttggagggctttgaggcctgtggtggaaaaggaattatcttcccgtaaaagctagatagaagcattgtcagaaacttctttgtgatgattgcattcaactcacagagttgaaggttccttttcaaagagcagtttccaatcactctttctgtggaatctgcaagtggatatttggacctctttgaagatttcgttggaaacgggagaatcttcacagaaaagctaaacagaagcattctcagaaacttctctgtgatgtttgtgttcaactcccagagtttcacattgcttctcatagagtagttctgaaacatgcttttcgtagtgtctgcaagtggacatttggagcgctttcaggcctgtggtggaaaacgaattatggtcacataaaaactggagagaagccttctcagaaacttctctgtgatgattgcattcaactcacagagttgaaccctcctatggatagagcagtgttgaaactctctttttgtggaatctgcaagtggatatgtggacctctccgaagatgtctttggaaacgggaatatcttcacataaaaactaaacagaagcattctcagaaacttcttggtgatgtttgcattcaaatcccagagttgaaccttcctttgatagttcaggtttgaaacactctttttgtaggatctgcaagtggatatttggaccactctgtggccttcgttcgaaacgggtacatcttcgcataaaatctagacagaagcattctcagaaaatactttgtgatgattgagtttaactcacagagctgaacattcctttggatggagcacgtttgagacacactttttgtagaatctacaagtggatatttggacctctctgaggatttcgttggaaacgggataactgcacctaactaagcggaagcattctcagaaactgctttgtgatgattgcattcacctcacagagttgaacattcctattgatagagcagtttggaaacactcttgttgtggaatgtgcaagtggagatttggagcgctttgaggcctatggtagtaaagggaatagcttcatagaaaaactagacagatgcattctcaggaacttctttttggtgatgtttgtattcaactcccagagttgaactttcctttggaaagagcagctatgaaacactctttttctagaatctgcaagtggacgtttggagggctttgtggtttgtggtggaaaaggaaatatcttcacctaaatactagatagaagcattctcagaagcttctctgtgatgactgcattcaactcatggagttgaacactccttttgagagcgcagttttgaaactctctttctgtggcatctgcaaggggacatgtagacctctttgaagatttcgttggaaacggaatcatcttcacataaaaactatacagaagcagtctcagaatcttctttgtgatgtttgcattcaaatcccagagttgaactttcctttcaaagttcacgtttgaaacactctttttgcaggatctacaagtggatatttggaccactctgtgtccttcgttcgaaacgggtatatcttcacacgacatctagacagaagctttctcagaaaattctttgggatgattgagtggaactcacagtagctgaacattccttgcgatggagcagtttagaaacacactttctgcagaatctgcaagtgcatatttggacctctctgaggaattcgttggaaacgggataatttcagctgactaaacagaagcattctcagaaccttcttcgtgatgtctgcattcaactcacagtgtggaacctttctttgatagttcaggtttgaaacactctttttgtagaaactgcaaggggataattgcacttctttgaggcctaccgtagtaaaggaaataacttcctatagaaagaagacagaagcattctcagaaccctcttcgtgatgtttgcattcaactcacagtgctgaacctttctttgatagttcagctttgaaacactcttcttgtagaaactgcaagtggatattttgtcctctctgaggatttcgttgtaaacgggataaaccgcacggaaataaacagaagcattctcagaaccttcttcgtgatgtttgcattcaactcacagtgttgaacctttctttgatagttcaggtttgaaacggtctttctgtagaaactgcaagtagatatttggacctctctgaggatttcgttggaaacgggataaaccgcacagaactaaacagaagcattcacagaaaactcttggtgacgactgagtttaactcacagagctgaacattcctttggatggagcagtttcgaaccacactatttgtagaatctgcaagtggatatgtgggcctctctgaggatttcgttggaaacgggataaaacgcatagaactaaaacagaagcattctcagaaactactttgtgatgattgcattcaagtcacagagttgaacattccctttgacagagcagtttggaaactctctttgtgtagaatctgcaagtggagatatggaccgctttgaggcctatggtagtaaaggaaatatcttcatataaaagctagacagtagcattctcagaaacttctttgtgatgcttgcattcaactcacagagttgaactttcctttcgagagagaagctttgaaacactctttttccagaatgtgcaagtggacatttggagggctttgaggcctgtggtggaaaaggaattatcttcccgtaaaagctagatagaagcattgtcagaaacttctttgtgatgattgcattcaactcacagagttgaaggttccttttcaaagagcagtttccaatcactctttctgtggaatctgcaagtggatatttggacctattttgaagatttcgttggaaacgggagaatcttcacaggaaagctaaacagaagcattctcagaaacttctctgtgatgtttgtgttcaactcccagagtttcacattgcttttcatagagtagttctgaaacatgcttttcgtagtgtctacaagtggacatttggagcgctttcaggcctgtggtggaaaacgaattatggtcacataaaaactggagagaagccttctcagaaacttctctgtgatgattgcattcaactcacagagttgaaccctcctatggatagagcagtgttgaaactctctttttgtggaatctgcaagtggatacgtggacctctccgaagatgtctttggaaacgggaatatcttcacataaaaactaaacagaagcattctcagaaacttcttggtgatgtttgcattcaaatcccagagttgaaccttcctttgatagttcaggtttgaaacactctttttgtaggatctgcaagtggatatttggaccactctgtggccttcgttcgaaacgggtatatcttcgcataaaatctagacagaagcattctcagaaaatactttgtgatgattgagtttaactcacagagctgaacattcctttggatggagcaggtttgagacacaccttttgtagaatctacaagtggatatttggacctctctgaggatttcgttggaaacgggataactgcacctaactaaacggaagcattctcagaaactgctttgtgatgattgcattcacctcacagagttgaacattcctattgatagagcagtttggaaacactcttgttgtggaatgtgcaagtggagatttggagcgctttgaggcctatggtagtaaagggaatagcttcatagaaaaactagacagatgcattctcaggaactttttggtgatgtttgtattcaactcccagagttgaactttcctttggaaagagcagctatgaaacactgtttttctagaatctgcaagtggacgtttggagggctttgtggtttgtggtggaaaaggaaatatcttcacctaaatactagatagaagcatcctcagaagcttctctgtgatgactgcattcaactcacggagttgaacactccttttgagagcgcagttttgaaactctctttctgtggcatctgcaaggggacatgtagacctctttgaagatttcgttggaaacggaatcatcttcacataaaaactatacagaagcagtctcagaatcttctttgtgatgtttgcattcaaatccccgagttgaactttcctttcaaagttcacgtttgaaacactctttttgcaggatctacaagtggatatttggaccactctgtgtccttcgttcgaaacgggtatatcttcacatgacatctagacagaagctttctcagaaaattctttgggatgattgagttgaactcacagagctgagcattccttgcgatgtagcagtttagaaacacactttctgcagaatctgcaagtgcatatttggacctctgtgaggaattcgttggaaacgggataatttcagctgactaaacagaagcattctcagaaccttcttcgtgatgtctgcattcaactcacagtgtggaacctttctttgatagttcaggtttgaaacactctttttgtagaaactgcaaggggataattgcactctttgaggagtaccgtagtaaaggaaataacttcctataaaaagaagacagaagcattctcagaaccctcttcgtgatgtttgcattcaactcacagtgctgaacctttctttgatagttcaggtttgaaacactctttttgtagaaactgcaagtggatatttggtcctctctgaggatttcgttggaaacgggataaactgcacagaactaaacagaagcattctcagaaccttcttcgtgatgtttgcattcaactcacagtgttgaaccttcctttgatagttcaggtttgaaacggtctttctgtagaaactgcaagtagatatttggacctctctgaggatttcgttggaaacgggataacccgcacagaactaaaacagaagcattcacagaaaactcttggtgacgactgagtttaactcacagagctgaacattcctttggatggagcagtttcgaaacacactatttgtagaatctgcaagtggatatttgggcctctctgaggatttcgttggaaacgggataaaccgcacagaactaaaacagaagcattctcagaaactactttgtgatgattgcattcaagtcacagagttgaacattccctttgacagagcagtttggaaactctctttgtgtagaatctgcaagtggagatatggaccgctttgaggcctatggtagtaaaggaaatagcttcatataaaagctagacagtaacattctcagaaacttctttgtgatgcttgcattcaactcacagagttgaactttcctttcgagagacaagctttgaaacactctttttccagaatgtgcaagtggacatttggggagctttgaggcctgtggtggaaaaggaattatcttcccgtaaaagctagatagaagcattgtcagaaacttctttgagatgattgcattcaactcacagagttgaaggttccttttcaaacagcagtttccaatcactctttctgtggaatctgcaagtggatatttcgacctctttgaagatttcgttggaaacgggagaatcttcacagaaaagctaaacagaagcattctcagaaacttctctgtgatgtttgtgttcaactcccagagtttcacgttgcttttcatagagtagttctgaaacatgcttttcgtagtgtctgcaagtggacatttggagcgctttcaggcctgtggtggaaaacgaattatggtcacataaaaactggagagaagccttctcagaaacttctctgtgatgattgcattcaactcacagagttgaaccctcctatggatagagcagtgttgaaactctctttttgtggaatctgcaagtggatatgtggacctctccgaagatgtctttggaaacgggaatatcttcacataaaaactaaacagaagcattctcagaaacttcttggtgatgtttgcattcaaatcccagagttgaaccttcctttgatagttcaggtttgaaacactctttctgtaggatctgcaagtggctatttggaccactctgtggccttcgttcgaaacgggtatatcttcgcataaaatctagacagaagcattctcagaaaatactttgtgatgattgagtttaaatcacagagctgaccattcctttggatggagcaggtttgagacacactttttgtagaatctacaagtggatatttggacctctctgaggatttcgttggaaacgggataactgcacctaactaaacggaagcattctcagaaactgctttgtgatggttgcattcacctcacagagttgaacattcctattgatagagcagtttggaaacactcttgttgtggaatgtgcaagtggagatttggagcgctttgaggcctatggtagtaaagggaatagcttcatagaaaaactagacagatgcattctcaggaactttttggtgatgtttgtattcaactcccagagttgaactttcctttggaaagagcagctatgaaacactctttttctagaatctgcaagtggacgtttggagggctttgtggtttgtggtggaaaaggaaatatcttcacctaaatactagatagaagcattctcagaagcttctctgtgatgactgcattcaactcacggagttgaacactccttttgagagcgcagttttgaaactctctttctgtggcatctgcaaggggacatgtagacctctttgaagatttcgttggaaacggaatcatcttcacataagaactatacagaagcagtctcagaatcttctttgtgatgtttgcattcaaatcccagagttgaactttcctttcaaagttcacgtttgaaacactctttttgcaggatctacaagtggatatttggaccactctgtgtccttcgttcgaaacgggtatatcttcacatgacatctagacagaagctttctcagaaaattctttgggatgattgagtggaactcacagagctgaacattccttgcgatgtagcagtttagaaacacactttctgcagaatctgcaagtgcatatttggacctctctgaggaattcgttggaaacgggataatttcagctgactaaacagaagcattctcagaaccttcttcgtgatgtctgcattcaactcacagtgtggaacctttctttgatagctcaggtttgaaacactctttttgtagaaactgcaaggggataattgcacttctttgaggcctaccgtagtaaaggaaataacttcctatagaaagaagacagaagcattctcagaaccctcttcgtgatgtttgcattcaactcacagtgctgaacttttctttgatagttcagctttgaaacactcttcttgtagaaactgcaagtggatatttgggtcctctctgaggatttcgttggaaacgggataaaccgcacagaactaaacagaagcattctcagaaccttcttcgtgatgtttgcattcaactcacagtgttgaacctttccttgatagttcaggtttgaaacggtcattctgtagaaaatgcaagtagatatttggacctctctgaggatttcgttggaaacgggataaaccgcacagaactaaaacggaagcattctcagaaccctcttcgtgatgtttgcattcaactcacagtgctgaacctttcttgatagttcagctttgaaacactcttcttgtagaaactgcaagtggatatttggtcctctctgaggatttcgttggaaacgggataaaccgcacagaactaaacagaagcattctcagaaccttcttcgtgatgtttgcattcaactcacagtgttgaaccttcctttgatagttcaggtttgaaacggtctttctgtagaatctgcaagtagatatttggacctctctgaggatttcgttggaaacgggataaaccgcaaagaactaaaacagaagcattcacagaaaactcttggtgacgactgagtttaactcacagagctgaacattcctttggatggagcagtttcgaaacacactatttgtagaatgtgcaagtggatatttgggcctctctgaggatttcgttggaaacgggataaaccgcacagaactaaacagaagcattctcagaaactactttgtgatgattgcattcaagtcacagagttgaacattccctttgacagagcagtttggaaactctctttgtgtagaatctgcaagtggagatatggaccgctttgaggcctatggtagtaaaggaaatagcttcatataaaagctagacagtagcattctcagaaacttctttgtgatgcttgcattcaactcacagagttgaactttcctttcgagagagaagcttggaaacactctttttccagaatctgcaagtggacatttggagggctttgaggcctgtggtggaaaaggaattatcttcccgtaaaagctagatagaagcattgtcagaaacttctttgtgatgattgcattcaactcacagagttgaaggttccttttcaaagagcagtttccaatcactctttgtgtggaatctgcaagtggatatttggacctattttgaagatttcgttggaaacgggagaatcttcacaggaaagctaaacagaagcattctcagaaacttctctgtgatgtttgtgttcaactcccagagtttcacattgcttttcatagagtagttctgaaacatgcttttcgtagtgtctgcaagtggacatttggagcgctttcaggcctgtggtggaaaacgaattatggtcacataaaaactggagagaagccttctcagaaacttctctgtgatgattgcattcaactccacagagttgaaccctcctatggatagagaagtgttgaaactctctttttgtggaatctgcaagcggatatgtggacctctccgaagatgtctttggaaacgggaatatcttcacataaaaactaaacagaagcattctcagaaacttcttggtgatgtttgcattcaaatcccagagttgaaccttcctttgagagttcaggtttgaaacactctttttgtaggatctgaaagtggatatttggaccactctgtggccttcgttcgaaacgggtacatcttcgcataaaatctagacagaagcattctcagaaaatactttgtgatgattgagttgaactcacagagctgaacattcctttggatggagcaggtttgagacacactttttgtagaatctacaagtggatatttggacctctctgaggatttcgttggaaacgggataactgcacctaactaaacggaagcattctcagaaactgctttgtgatgattgcattcacctcacagagttgaacattcctattgatagagcagtttggacacactcttgttgtggaatgtgcaagtggagatttggagcgctttgaggcctatggtagtaaagggaacagcttcatagaaaaactagacagatgcattctcaggaactttttggtgatgtttgtattcaactcccagagttgaactttcctttggaaagagcagctatgaaacactctttttctagaatctgcaagtggacgtttggagggctttgtggtttgtggtggaaaaggaaatatcttcacctaaatactagatagaagcattctcagaagcttctctgtgatgactgcattcaactcacggagttgaacactccttttgagagcgcagttttgaaactctctttctgtggcatccgcaaggggacatgtagacctctttgaagatttcgttggaaacggaatcatcttcacataaaaactatacagaagcagtctcagaatcttctttgtgatgtttgcattcaaatcccagagttgaactttcctttcaaagttcacgtttgaaacactctttttgcaggatctacaagtggatatttggaccactctgtgtccttcgttcgaaacgggtatatcttcacatgacatctagacagaagctttctcagaaaattgtttgggatgattgatttgaactcacagaggtgagcattccttgcgatgtagcagtttagaaacacactttctgcagaatctgcaagtgcatatttggacctctctgaggaattcgttggaaacgggataatttcagctgactaaacagaagcattctcagaaccttcttcgtgatgtctgcattcaactcacagtgtggaacctttctttgatagttcaggtttgaaacactctttttgtagaaactgcaaggggataattgcactctttgaggagtaccgtagtaaaggaaataacttcctataaaaagaagacagaagcattctcagaaccctcttcgtgatgtttgcattcaactcacagtgctgaacctttctttgatagttcagctttgaaacactctttttgtagaaactgcaaatggatatttggtcctctctgaggatttcgttggaaaagggataaaacgcacagaactaaacagaagcattcagaaaaaactcttggtgacgactgagtttaactcacaggagctgaacattcctttggatggagcagtttcgaaacacactatttgtagaatgtgcaagtggatatttgggcctctctgaggatttcgttggaaacgggataaaccgcacagaactaaacagaagaattctcagaaactactttgtgatgattgcattcaagtcacagagttgaacattccctttgacagagcagtttggaaactctatttgtgtagaatctgcaagtggagatatggaccgctttgaggcctatggtagtaaaggaaatagcttcatatgaaagctagacagtagcattctcagaaacttctttgtgatgcttgcattcaactcacagagttgaactttcctttcgagagagaagctttgaaacactctttttccagaatgtgcaagtggacatttggagggctttgaggcctgtggtggaaaaggaattatcttcccgtaaaagctagatagaagcattgtcagaaacttctttgtgatgattgcattcaactcacagagttgaaggttccttttcaaacagcagtttccaatcactctttctgtggaatctgcaagtggatatttgggcctctctgaggatttcgttggaaacgggataaaacgcacagaactaaaacagaagcattctcagaaacttctctgtgatgtttgtgttcaactcccagagtttcacgttgcttttcatagagtagttctgaaacatgcttttcgtagtgtctgcaagtggacatttggatcgctttcaggcctgtggtggaaaacgaattatggtcacataaaaactggagagaagcattctcagaaaatactttgtgatgattgagtttaaatcacagagctgaccattcctttggatggagcaggtttgagacacactttttgtagaatctacaagtggatatttggacctctctgaggatttcgttggaaacgggataactgcacctaactaaacggaaagcattctcagaaactgctttgtgatgattgcattcacctcacaggagttgaacattcctattgatagagcagtttggaaacactcttgttgtggaatgtgcaagtggagatttggagcgctttgaggcctgtggtagtaaagggaatagcttcatagaaaaactagacagatgcattctcaggaactttttggtgatgtttgtattcaactcccagagttgaactttcctttggaaagagcagctatgaaacactctttttctaggatctgcaagtggacgtttggagggctttgtggtttgtggtggaaaaggaaatatcttcacctaaatactagagagaagcattctcagaagcttctctgtgatgactgcattcaactcacggagttgaacactcctcttgagagcgcagttttgaaactctctttctgtggcatccgcaaggggacatgtagacctctttgaagatttcgttggaaacggaatcatcttcacataaaaactatacagaagcagtctcagaatcttctttgtgatgtttgcattcaaatcccagagttgaactttcctttcaaagttcacgtttgaaacactctttttgcaggatctacaagtggatatttggaccactctgtgtccttcgttcgaaacgggtatatcttcacatgacatctagacagaagctttctcagaaaattctttgggatgattgagtggaactcacagagctgaacattccttgcgatgtagcagtttagaaacacactttctgcagaatctgcaagtgcatatttggacctctctgaggaattcgttggaaacgggataatttcagctgactaaacagaagcattctcagaaccttcttcgtgatgtttgcattcaactcacagtgctgaacctttctttgatagttcagctttgaaacactctttttgtagaatctgcaaggggataattgcacttctttgaggcctaccgtagtaaaggaaataacttcctatagaaagaagacagaagcattcacagaaaactcttggtgacgaatgagtttaactgacagagctgaacattcctttggatggagcagtttcgaaacacactatttgtagatttgcaagtggatatttgggcctctctgaggatttcgttggaaacgggataaaccgcacagaactaaacagaagcattctcagaaactactttgtgatgattgcattcaagtcacagagctgaacattccctttgacagagcagtttggaaactctctttgtgtagaatctgcaagtggagatatggaatgctttgaggactatggtagtaaaggaaatagcttcatataaaagctagacagtagcattctcagaaacttctttgtgatgcttgcattcaactcacagagttgaactttcctttcgagagagaagcttcgaaacactctttttccagagtctgcaagtggacatttggagggctttgaggcctgtggtggaaaaggaattatcttcccgtaaaagctagatagaagcattgtcagaaacttctttgtgatgattgcattcaactcacagagttgaaggttcctttttaaacagcagtttccaaacactctttctttggaatctgcaagtggatgtttggacctctttgaagatttcgttggaaacgggagaatcttcacagaaaagctaaacagaagcattctcagaaacttctctgtgatgtttgtgttcaactcccagagtttcacgttgcttttcatagagtagttctgaaacatgcttttcgtagtgtctgcaagtggacatttggagcgctttcaggcctgtggtggaaaacgaattatggtcacataaaaactggagagaagccttctcagaaacttctctgtgatgattgcattcaactcacagagttgaaccctctatggatagagcagtgttgaaactctctttttgtggaatctgcaagtggatatgtggacctctccgaagatgtctttggaaacgggaatatcttcacataaaaactaaacagaagcattctcagaaacttcttggtgatgtttgcattcaaatcccagagttgaaccttcctttgatagttcaggtttgaaacactctttttgtaggatctggaagtggctatttggaccactctgtggccttcgttcgaaacgggtatatcttcgcataaaatctagacagaagcattctcagaaaatactttgtgatgattgagtttaactcacagagctgaacattcctttggatggagcaggcttgagacacactttttgtagaatccacaagtggatatttggacctctctgaggatttcgttggaaacgggataactgcaccgaactaaacggaagcattctcagaaactgctttgtgatgattgcattcacctcacagagttgaacattcctattgatagagcagtttggaaacactcttgttgtggaatgtgcaagtggagatttggagcgctttgaggcctgtggtagtaaagggaatagcttcatagaaaaactagacagatgcattctcaggaactttttggtgatgtttgtattcaactcccagagttgaacttttctttggaaagagcagctatgaaacactgtttttctagaatctgcaagtggacgtttggagggctttgtggtttgtggtggaaaaggaaatatcttcacctaaatactagatagaagcagtctcagaagcttctctgtgatgactgcattcaactcacggagttgaacactccttttgagagcgcagttttgaaactctctttctgtggcatctgcaaggggacatgtagacctctttgaagatttcgttggaaacggaatcatcttcacataaaaactatacagaagcagtctcagaatcttctttgtgatgtttgcattcaaatcccagagttgaactttcctttcaaagttcacgtttgaaacactctttttgcaggatctacaagtggatatttggaccactctgtgtccttcgttcgaaacaggtatatcttcacatgacatctagacagaagctttctcagaaaattctttgggatgattgagttgaactcacagagctgagcattccttgcgatgtagcagtttagaaacacactttctgcagaatctgcaagtgcatatttggacctctctgaggaattcgttggaaacgggataatttcagctgactaaacagaagcattctcagaaccttcttcgtgatgtctgcattcaactcacagtgtggaacctttctttgatagttcaggtttgaaacactctttttgtagaaactgcaaggggataattgcacttctttgaggcctaccgtagtaaaggaaataacttcctatagaaagaagacagaagcattctcagaaccctcttcgtgatgtttgcattcaactcacagtgctgaacctttctttgatagttcagctttgaaacactcttcttgtagaaactgcaagtggatatttggtcctctctgaggatttcgttggaaacgggataaaccacacagaactaaacagaagcattctcagaaccttcttcgtgatgtttgcattcaactcacagtgttgaacctttctttgatagttcaggttggaaacggtctttctgtagaaactgcaagtagatatttggacctctctgaggatttcgttggaaacgggataaaccgcacagaactaaaacagaagcattcacagaaaactcttggtgacgactgagtttaactcacagagctgaacattcctttggatggagcagtttcgaaacacactatttgtagaatgtgcaagtggatatttgggcctctctgaggatttcgttggaaacgggataaaccgcacagaactaaacagaagcattctcagaaactaatttgtgatgattgcattcaagtcacagagttgaacattccctttgacagagcagtttggaaactctctttgtgtagaatctgcaagtggagatatggaccgctttgaggcctatggtagtaaaggaaagagcttcatataaaagctagacagtagcattctcagaaacttctttgtgatgcttgcattcaactcacagagttgaactttcctttcgagagagaagctttgaaacactctttttccagaatctgcaagtggacatttggagggctttgaggcctgtggtggaaaaggaattatcttcccgtaaaagctagatagaagcattgtcagaaacttctttgtgatgattgcattcaactcacagagttgaaggttccttttcaaagagcagtttccaatcactctttctgtggaatctgcaagtagatatttggaccgctttgaagatttcgttggaaacgggagaatcttcacagaaaagctaaacagaagcattctcagaaacttctctgtgatgtttgtgttcaactcccagagtttcacattgcttttcatagagtagttctgaaacatgcttttcgtagtgtctgcaagtggacatttggagcgctttcaggcctgtggtggaaaacgaattatggtcacataaaaactggagagaagccttctcagaaacttctctgtgatgattgcattcaactcacagagttgaaccctcctatggatagagcagtgttgaaactctctttttgtggaatctgcaagtggatatgtagacctctccgaagatgtctttggaaacgggaatatcttcacataaaaactaaacagaagcattctcagaaacttcttggtgatgtttgcattcaaatcccagagttgaaccttcctttgatagttcaggtttgaaacactctttttgtaggatctgcaagtggatatttggaccactctgtggccttcgttcgaaacgggtacatctttgcataaaatctagacagaagcattctcagaaaatactttgtgatgattgagttgaactcacagagctgaacattcctttggatggagcaggtttgagacacactttttgtagaatctacaagtggatatttggacctctctgaggatttcgttggaaacgggataactgcacctaactaaacggaagcattctcagaaactgctttgtgatgattgcattcacctcacagagttgaacattcctattgatagagcagtttggaaacactcttgttgtggaatgtgcaagtggagatttggagcgctttgaggcctatggtagtaaagggaatagcttcatagaaaaactagacagatgcattctcaggaactttttggtgatgtttgtattcaactcccagagttgaactttcctttggaaagagcagctatgaaacactctttttctagaatctgcaagtggacgtttggagggctttgtggtttgtggtggaaaaggaaatatcttcacctaaatactagatagaagcattctcagaagcttctctgtgatgactgcattcaactcacggagttgaacactccttttgagagcgcagttttgaaactctctttctgtggcatctgcaaggggacatgtagacctctttgaagatttcgttggaaacggaatcatcttcacataaaaactatacagaagcagtctcagaatcttctttgtgatgtttgcattcaaatcccagagttgaactttcctttcaaagttcacgtttgaaacactctttttgcaggatctacaagtggatatttggagcactctgtgtccttcgttcgaaacgggtatatcttcacatgacatctagacagaagctttctcagaaaattctttgggatgattgagtggaactcacagagctgaacattccttgcgatggagcagtttagaaacacactttctgcagaatctgcaagtgcatatttggacctctctgaggaattcgttggaaacgggataatttcagctgactaaacagaagcattctcagaaccttcttcgtgatgtctgcattcaactcacagtgtggaacctttctttgatagttcaggtttgaaacactctttttgtagaaactgcaaggggataattgcacttctttgaggcctaccgtagtaaaggaaataacttcctatagaaagaagacagaagcattctcagaaccctcttcgtgatgtttgcattcaactcacggtgctgaacctttctttgatagttcagctttgaaacactctttttgtagaaactgcaagtggatatttggtcctctctgaggatttcgttggaaacgggataaaccgcacagaactaaacagaagcattctcagaaccttcttcgtgatgtttgcattcaactcacagtgttgaacctttctttgatagttcaggtttgaaacggtctttctgtagaaactgcaagtagatatttggacctctctgaggatttcgttggaaacgggataaaccgcacacaactaaaacagaagcattcacagaaaactcttggtgacgactgagtttaactcacagagctgaacattcctttggatggagcagtttcgaaacacactatttctagaaggtgcaagtggatatgtgggcctctctgaggatttcgttggaaacgggataaaccgcacagaactaaacagaagcattctcagaaactactttgtgatgattgcattcaagtcacagagttgaacattccctttgacagagcagtttggaaactctctttgtgtagaatctgcaagtggagatatggaccgctttgaggcctatggtagtaaaggaaatagcttcatataaaagctagacagtagcattctcagaaacttctttgtgatgcttgcattcaactcacagagttgaactttcctttcgagagagaagctttgaaacactctttttccagaatctgcaagtggacatttggagggctttgaggcctgtggtggaaaaggaattatcttcccgtaaaagctagatagaagcattgtcagaaacttctttgtgatgattgcattcaagtcacagagttgaaggttccttttcaaagagcagtttccaatcactctttctgaggaatctgcaagtggatatttggacctctttgaagatttcgttggaaacgggagaatcttcacagaaaagctaaacagaagcattctcagaaacttctctgtgatgtttgtgttcaactcccagagtttcacattgcttctcatagagtagttctgaaacatgcttttcgtagtgtctgcaagtggacatttggagcgctttcaggcctgtggtggaaaacgaattatggtcacataaaaactggagagaagccttctcagaaacttctctgtgatgattgcattcaactcacagagttgaaccctcctatggatagagcagtgttgaaactctctttttgtggaatctgcaagcggatatgtggacctctccaaagatgtctttggaaaagggaatatcttcacataaaaactaaacagaagcattctcagaaacttcttggtgatgtttgcattcaaatcccagagttgaaccttcctttgagagttcaggtttgaaacactctttttgtaggatctgcaagtggatatttggaccactctgtggccttcgtttgaaacgggtacatcttcgcataaaatctagacagaagcattctcagaaaatactttgtgatgattgagtttaaatcacagagctgaccattcctttggatggagcaggtttgagacacactttttgtagaatctacaagtggatatttggacctctctgaggatttcgttggaaacgggataactgcacctaactaaacggaagcattctcagaaactgctttgtgatgattgcattcacctcacagagttgaacattcctattgatagagcagtttggaaacactcttgttgtggaatgtgcaagtggagatttggagcgctttgaggcctatggtaataaagggaatagcttcatagaaaaactagacagatgcattctcaggaactttttggtgatgtttgtattcaactcccagagttgaactttcctttggaaagagcagctatgaaacactctttttctagaatctgcaagtggacgtttggagggctttgtggtttgtggtggaaaaggaaatatcttcacctaaatactagatagaaagcattctcagtaagcttctctgtgatgactgcattcaactcacggagttgaacactccttttgagagcgcagttttgaaactctctttctgtggcatctgcaaggggacatgtagacctctttgaagatttcgttggaaacggaatcatcttcacataaaaactatacagaagcagtctcagaatcttctttgtgatgtttgcattcaaatccccgagttgaactttcctttcaaagttcacgtttgaaacactctttttgcaggatctacaagtggatatttggaccactctgtgtccttcgttcgaaacgggtatatcttcacatgacatctagacagaagctttctcagaaaattctgtgggatgattgagtggaactcacagagctgaacattccttgcgatgtagcagtttagaaacacactttctgcagaatctgcaagtgcatatttggacctctctgaggaattcgttggaaacgggataatttcagctgactaaacagaagcattctcagaaccttcttcgtgatgtctgcattcaactcacagtgtggaacctttctttgatagttcaggtttgaaacactctttttgtagaaactgcaaggggataattgcacttctttgaagcctaccgtagtaaaggaaataacttcctatagaaagaagacagaagcattctcagaaccctcttcgtgatgtttgcattcaactcacagtgctgaacctttctttgatagttcagctttgaaacgctcttcttgtagaaactgcaagtggatattttgtcctctctgaggatttcgttgtagacgggataacctgcacagaactaaacagaagcattctcagagccctcttcgtgatgtttgcattcaactcacagtgctgaacctttctttgatagtgcagctttgaaacactctttttctagaaactgcaagtggatatttggacctctctgaggatttcgttggaaactggataaaccgcacagaactaaaacagaagcattcacagaaaactcttggtgacgactgagtttaactcacagagctgaacattcctttggatggagcagtttcgaaacacactatttgtagaatctgcaagtggatatttgagcctactctgaggatttcgatggaaacgggataaaacgcacagaactaaaacagaagcattctcagaaactactttgtgatgattgcattcaagtcacagagttgaacattccctttgacagagcagtttggaaactctctttgtgtagaatctgcaagtggagatatggaccgctttgaggcctatggtagtaaaggaaatagcttcatataaaagctagacagtagcattctcagaaacttctttgtgatgcttgcattcaactcacagagttgaactttcctttcgagagagaagctttgaaacactctttttccggaatctgcaagtggacatttggagggctttgaggcctgtggtggaaaaggaattatcttcccgtaaaagctagatagaagcattgtcagaaacttctttgtgatgattgcattcaactcacagagttgaaggttccttttcaaagagcagtttccaatcactctttctgtggaatctgcaagtggatatttggacctattttgaagatttcgttggaaacgggagaatcttcacaggaaagctaaacagaagcattctcagaaacttctctgtgatgtttgtgttcaactcccagagtttcacattgcttttcatagagtagttctgaaacatgcttttcgtagtgtctacaagtggacatttggagcgctttcaggcctgtggtggaaaacgaattatggtcacataaaaactggagaaaagccttctcagaaacttctctgtgctgattgcattcaactcacagagttgaaccctcctatggatagagcagtgttgaaactctctttttgtggaatctgcaagtggatatgtggacctctccgaagatgtctttggaaacgggaatatcttcacataaaaactaaacagaagcattctcagaaaattcttggtgatgtttgcattcaaatcccagagttgaaccttcctttgatagttcaggtttgaaacactctttttgtaggatctgcaagtggatatttggaccactctgtggccttcgttccaaacgggtacatctccgcataaaatctagacagaagcattctcagaaaatactttgtgatgattgagttgaactcacagagctgaacattcctttggatggagcaggtttgagacacactttttgtagaatctacaagtggatatttggacctctctgaggatttcgttggaaacgggataactgcacctaactaaacggaagccttctcagaaactgcttggtgatgattgcattcacctcacagagttgaacattcctattgatagagcagtttggaaacactcttgttgtggaatgtgcaagtggagatttggagcgctttgaggcctatggtagtaaagggaagagcttcatagaaaaactagacagatgcattctcaggaactttttggtgatgtttgtattcaactcccagagttgaactttcctttggaaagagcagctatgaaacactctttttctagaatctgcaagtggacgtttggagggctttgtggtttgtggtggaaaaggaaatatcttcacctaaatactagatagaagcattctcagaagcttctctgtgatgactgcattcaactcacggagttgaacactccttttgagagcgcagttttgaaactctctttctgtggcatccgcaaggggacatgaagacctctttgaagatttcgttggaaacggaatcatcttcacataaaaactatacagaagcagtctcagaatcttctttgtgatgtttgcattcaaatcccagagttgaactttcctttcaaagttcacgtttgaaacactctttttgcaggatctacaagtggatatttggaccactctgtgtccttcgttcgaaacgggtatatcttcacacgacatctagacagaagctttctcagaaaattctttgggatgattgagtggaactcacagagctgaacattccttgcgatgtagcagtttagaaacacactttctgcagaatctgcaagtgcatatttggacctctctgaggaattcgttggaaacgggataatttcagctgactacacagaagcattctcagaaccttcttcgtgatgtctgcattcaactcacagtgtggaacctttctttgatagttcaggtttgaaacactctttttgtagaaactgcaaggggataattgcacttctttgaggcctaccgtagtaaaggaaataacttcctatagaaagaagacagaagcattcacagaaaactcttggtgacgactgagtttaactcacagagctgaacattcctttggatggagcagtttcgaaacacactatttgtagaatctgcaagtggatatttgggcctctctgaggatttcgttggaaacgggataaaacgcacagaactaaacagaagcattctcagaaactactttgtgatgattgcattcaagtcacagagttgaacattccctttgacagagcagtttggaaactctctctgtgtagaatctgcaagtggagatatagaccgctttgaggcctatggtagtaaaggaaatagcttcatataaaagctagacagtagcattctcagaaacttctttgtgatgctcgcattcaactcacagagttgaactttcctttcgagagagaagctttgaaacactctttttccagaatctgcaagtggacatttggagggctttgaggcctgtggtggaaaaggaattatcttcccgtaaaagctagacagaagcattgtcagaaacttctttgtgatgattgcattcaactcacagagttgaaggttccttttcaaagagcagtttccaatcactctttctgtggaatctgcaagtggatatttggacctctttgaagatttcgttggaaacgggagaatcttcaaaggaaagctaaacagaagcattctcagaaacttctctgtgatgtttgtgttcaactcccagagtttcacattgcttctcatagagtagttctgaaacatgcttttcgtagtgtctgcaagtggacatttggagcgctttcaggcctgtggtggaaaacgaattatggtcacataaaaactggagagaagccttctcagaaacttctctgtgatgattgcattcaactcacagagttgaaccctcctgtggatagagcagtgttgaaactctctttttgtggaatctgcaagcggatatgtggacctctccgaagatgtctttggaaacgggaatatcttcacataaaaactaaacagaagcattctcagaaacttcttggtgatgtttgcaatcaaatcccagagttgaaccttcctttgatagttcaggtttgaaacactctttttgtaggatctgcaagtggatatttggaccactctgtggccttcgttcgaaacgggtacatcttcgcataaaatctagacagaagcattctcagaaaatactttgtgatgattgagttgaactcacagagctgaacattcctttggatggagcaggtttgagacacactttttgtagaatctacaagtggatatttggacctctctgaggatatcgttggaaacgggataactgcacctaactaaacggaagcattatcagaaactgctttgtgatgattgcattcacctcacagagttgaacattcctattgatagagcagtttggaaacactcttgttgtggaatgtgcaagtggagatttggagcgctttgaggcctatggtagtaaagggaatagcttcatagaaaaactagacagatgcattctcaggaactttttggtgatgtttgtattcaactcccagagttgaactttcctttggaaagagcagctatgaaacactgtttttctagaatctgcaagtggacgtttggagggctttgtggtttgtggtggaaaaggaaatatccttcacctaaatactagatagaagcattctcagaagcttctctgtgatgactgcattcaactcacggagttgaacactccttttgagagcgcagttttgaaactctctttctgtggcatctgcaaggggacatgtagacctctttgaagatttcgttggaaacggaatcatcttcacataaaaactatacagaaagcagtctcagaatcttctttgtgatgtttgcattcaaatcccagagttgaactttcctttcaaagttcacgtttgaaacactctttttgcaggatctacaagtggatatttggaccactctgtgtccttcgttcgaaacgggtatatcttcacacgacatctagacagagctttctcagaaaattctttgggatgattgagtggaactcacagagctgaacattccttgcgatgtagcagtttagaaacacactttctgcagaatctgcaagtgcatatttggacctctctgaggaattcgttggaaacgggataatttcagctgactaaacagaagcattctcagaaccttcttcgtgatgtctgcattcaactcacagtgtggaacctttctttgatagttcaggtttgaaacactccttttgtagaaactgcaaggggataattgcacttctttgaggcctaccgtcgtaaaggaaataacttcctatagaaagaagacagaagcattctcagaaccctcttcgtgatgtttgcattcaactcacagtgctgaacctttctttgatagttcagctttgaaacactcttcttgtagaaactgcaagtggatatttggtcctctctgaggatttcgttggaaacgggataaaccgcacagaactaaacagaagaactctcagagccctcttcgtgatgtttgcattcaactcacagtgctgaacctttctttgatagtgcagctttgaaacactctttttgtagaaactgcaagtggatatttggtcctctctgaggatttcgttggaaacgggataaaccgcacagaactaaaacagaagcattcacagaaaactcttggtgacgactgagtttaactcacagagctgaacattcctttggatggagcagtttcgaaacacactatttgtagaatctgcaagtggatatttgggcctctctgaggatttcgttggaaacgggataaaacgcacagaactaaaacagaagcattctcagaaactactttgtgatgattgcattcaagtcacagagttgaacattccctttgacagagcagtttggaaactctctttgtgtagaatctgcaagtggagatatggaccgctttgaggcctatggtagtaaaggaaatagcttcatataaaagctagacagtagcattctcagaaacttctttgtgatgcttgcattcaactcacagagttgaactttcctttcgagagagaagctttgaaacactctttttccagaatgtgcaagtggacatttggggagctttgaggcctgtggtggaaaaggaattatcttcccgtaaaagctagatagaagcattgtcagaaacttctttgagatgattgcattcaactcacagagttgaaggttccttttcaaacagcagtttccaatcactctttctgtggaatctgcaagtggatatttcaacctctttgaagatttcgttggaaacgggagaatcttcacagaaaagctaaacagaagcattctcagaaacttctctgtgatgtttgtgttcaactcccagagtttcacgttgcttttcatagagtagttctgaaacatgcttttcgtagtgtctgcaagtggacatttggagcgatttcaggcctgtggtggaaaacgaattatggtcacataaaaactggagagaagccttctcagaaacttctctgtgatgattgcattcaactcacagagttgaaccctcctatggatagagcagtgttgaaactctctttttgtggaatctgcaagtggatatgtggacctctccgaagatgtctttggaaacgggaatatcttcacataaaaactaaacagaagcattctcagaaacttcttggtgatgtttgcattcaaatcccagagttgaaccttcctttgatagttcaggtttgaaacactctttttgtaggatctgcaagtggctatttggaccactctgtggccttcgttcgaaacgggtatatcttcgcataaaatctagacagaagcattctcagaaaatactttgtgatgattgagtttaaatcacagagctgaccattcctttggatggagcaggtttgagacacactttttgtagaatctacaagtggatatttggacctctctgaggatttcgttggaaacgggataactgcacctaactaaacggaagcattctcagaaactgctttgtgatgattgcattcacctcacagagttgaacattcctattgatagagcagtttggaaacactcttgttgtggaatgtgcaagtggagatttggagcgctttgaggcctatggtagtaaagggaatagcttcatagaaaaactagacagatgcattctcaggaactttttggtgatgtttgtattcaactcccagagttgaactttcctttggaaagagcagctatgaaacactctttttctagaatctgcaagtggacgtttggagggctttgtggtttgtggtggaaaaggaaatatcttcacctaaatactagatagaagcattctcagaagcttctctgtgatgactgcattcaactcacggagttgaacactccttttgagagcgcagttttgaaactctctttctgtggcatctgcaaggggacatgtagacctctttgaagatttcgttggaaacggaatcatcttcacataaaaactatacagaagcagtctcagaatcttctttgtgatgtttgcattcaaatcccagagttgaactttcctttcaaagttcacgtttgaaacactctttttgcaggatctacaagtggatatttggaccactctgtgtccttcgttcgaaacgggtatatcttcacacgacatctagacagaagctttctcagaaaattctttgggatgattgagtggaactcacagagctgaacattccttgcgatgtagcagtttagaaacacactttctgcagaatctgcaagtgcatatttggacctctctgaggaattcgttggaaacgggataatttcagctgactaaacagaagcattctcagaaccttcttcgtgatgtctgcattcaactcacagtgtggaacctttctttgatagttcaggtttgaaacactctttttgtagaaactgcaaggggataattgcacttctttgaggcctaccgtagtaaaggaaataacttcctatagaaagaagacagaagcattctcaaaaccctctttgtgatgtttgcattcaactcacagagctgaacctttctttgatagttcagctttgaaacactcttcttgtagaaactgcaagtggatatttggtcctctctgaggatttcgttggaaacgggataaaccgcacagaactaaacagaagcattctcagaaccttcttcgtgatgtttgcattcaactcacagtgttgaacctttctttgatagttcaggtttgaaacggtctttctgtagaaactgcaagtagatatttggacctctctgaggatttcgttggaaacgggataacccgcacagaactaaaacagaagcattcacagaaaactctcggtgacgactgagtttaactcacagagctgaacatccctttggatggagcagtttcgaaacacactatttgtagaatgtgcaagtggatattggggcctctctgaggatttcgttggaaacgggataaaccacacagaactaaacagaagcattctcagaaactactttgtgatgattgcattcaagtcacagagctgaacattccctttgacggagcagtttggaaactctctttgtgtagaatctgcaagtggagatatggaatgctttgaggactatggtagtaaagggaatagcttcatataaacgctagacagtagcattctcagaaacttctttgtgatgcttgcattcaactcacagagttgaaatttcctttcgagagagaagctttgaaacactctttttccagaatgttcaagtggatatttgcagggctttgaggcctgtggtggaaaaggaattatcttcccgtaaaagctagatagaagcattgtcagaaacttctttgtgatgattgcattcaactcacagtagttgaaggttccttttcaaacagcagtttccaatcactctttctgtggaatctgcaagtggatatttgggcctctctgaggatttcgttggaaacgggataaaacgcacagaactaaaacagaagcattctcagaaacttctctgtgatgtttgtgttcaactcccagagtttcacattgcttttcatagagtagttctgaaacatgcttttcgtagtgtctgcaagtggacatttggagcgctttcaggcctgtggtggaaaacgaattatggtcacataaaaactggagagaagccttctcagaaacttctctgtgatgattgcattcaactcacagagttgaaccctcctatggatagagcagtgttgaaactctctttctgtggaatctgcaagtggatatgtggacctctccgaagatgtctttggaaacgggaatatcttcacataaaaactaaacagaagcattctcagaaacttcttggtgatgtttgcattcaaatcccagagttgaaccttcctttgatagttcaggtttgaaacactctttttgtaggatctgcaagtggatatttggaccactctgtggccttcgttcgaaacgggtacatcttcacataaaatctagacagaagcattctcagaaaatactttgtgatgattgagtttaaatcacagagctgaccattcctttggatggagcaggtttgagacacactttttgtagaatctacaagtggatatttggacctctctgaggatttcgttggaaacgggataactgcacctaactaaacggaagcattctcagaaactgctttgtgatgattgcattcacctcacagagttgaacattcgtattgatagagcagtttggaaacactcttcttgtggaatgtgcaagtggagatttggagcgctttggggcctatggtagtaaagggaatagcttcatagaaaaactagacagatgcattctcaggaactttttggtgatgtttgtattcaactcccagagttgaactttcctttggaaagagcagctatgaaacactctttttctagaatctgcaagtggacgtttggagggctttgtggtttgtggtggaaaaggaaatatcttcacctaaatactagatagaagcattctcagaagcttctctgtgatgactgcattcaactcacggagttgaacactccttttgagagcgcagttttgaaactctctttctgtggcatccgcaagggaacatgtagacctgtttgaagatttcgttggaaacggaatcaatttcacataaaaactatacagaagcagtctcagaatcttctttgtggtgtttgcattcaaatcccagagttgaactttcctttcaaagttcacgtttgaaacactctttttgcaggatctacaagtggatatttggaccactctgtgtccttcgttcgaaacgggtatatcttcacatgacatctagacagaagctttctcagaaaattctttgggatgattgagttgaactcacagagctgagcattccttgcgatgtagcagtttagaaacacactttctgcagaatctgcaagtgcatatttggacctctgtgaggaattcgttggaaacgggataatttcagctgactaaacagaagaattctcagaaccttcttcgtgatgtctgcattcaactcaaagtgtggaacctttctttgatagttcaggttttaaaaactctttttgtagaaactgcaaggggataattgcactctttgaggagtaccgtagtaaaggaaataacttcctataaaaagaagacagaagcattctcagaaccctcttcgtgatgtttgcattcaactcacagtgctgaacctttctttgatagttcagctttgaaacactctttttgtagaaactgcaagtggatatttggtcctctctgaggatttcgttggaaacgggataaaacgcacagaacgaaacagaagcattctcagaaccttcttcgtgatgtttgcattcaactcacagtgttgaacctttctttgatagttcaggtttgaaacggtctttctgtagaaactgcaagtagatatttggacctctctgaggatttcgttggaaacgggataaacagcacagaactaaaacagaagcattctcacaaaactctttgtgacgactgagtttatctcacagagctgaacattcctttggatggagtagtttcgaaacacactttttgtagaatctgcaagtggatatttggaactctgagtatttttttggaaacgggttaaaattcacagaactaaacagcagcattctcagaaactactttgtgatgattgcattcaagtcatggatttgaacattctctttgacagagcagtttggaaactctctttttgtagaatctgcaagtggagatatggaccgctttgaggcctatggcagtaaaggaaataacttcatataaaaactagacagtagcattctcagaaacttcttcgtgatgtttgcattcaactcatagagttgaactttccttttgagagagaagctttgaaacactctttttctagaatctgcaagtggacatttggagggctttgaggcctgtgttggaaaaggaaatatcttcccgtaaaaactagagagaagcattgtcagaaacttctttgtgatgattgcattcaactcacaggagttgaaggttccttttcaaacagcagtttccaatcactctttctgtggaatctgcaagtggatatttcgacctctttgaagatttcgttggaaacgggagaatcttcacagaaaagctaaacagaagcattctcagaaacttctctgtgatgtttgtgttcaactcccagagtttcacgttgcttttcatagagtagttctgaaacatgcttttcgtagtgtctgcaagtggacatttggagcgctttcaggcctgtggtggaaaacgaattatggtcacataaaaactggagagaagccttctcagaaacttctctgtgatgattgcattcaactcacagagttgaaccctcctatggatagagcagtgttgaaactctgtttttgtggaatctgcaagtggatatgtggacctcgccgaagatgtctttggaaacgggaatatcttcacataaaaactaaacagaagcattctcagaaacttcttggtgatgtttgcattcaaatcccagagttgaaccttcctttgatagttcaggtttgaaacactctttttgtaggatctgcaagtggatatttggaccacactgtggccttcgttcaaaacgggtacatcttcgcataatatgtagacagaagcattctcagaaaatactttgtgatgattgagtttaactcacagagctgaacattcctttggatggagcaggtttgagacacactttttgtagaatctacaagtggatatttcgacctttctgaggatttcgttggaaacgggttaactgcacctaactaaacggaagcgttctcagaaactgctttgtgatgattgcattcacctcacagagttgaacattcctattgatagagcagtttggaaacactcctgttgtggaatgtgcaagtggagatttggagcgctttgaggcctatggtagtaaagggaataacttcatagaaaaactagacagatgcattctcaggaactttttggtgatgtttgtattcaactcccagagttgaactttcctttggaaagagcagctatgaaacactctttttctagaatctgcaagtggacgtttggagggctttgtggtttgtggtggaaaaggaaatatcttcacctaaatactagatagaagcattctcagaagcttctctgtgatgactgcattcaactcacggagttgaacactccttttgagagcgcagttttgaaactctctttctgtggcatctgcaaggggacatgtagacctctttgaagatttcgttggaaacggaatcatcttcacataaaaactatacagaagcagtctcagaatcttctttgtgatgtttgcattcaaatcccagagttgaactttcctttcaaagttcacgtttgaaacactctttttgcaggatctacaagtggatatttggaccactctgtgtccttcgttcgaaacgggtatatcttcacacgacatctagacagaagctttctcagaaaattctttgggatgattgagttgaactcacagagctgaacattccttgcgatgtagcagtttagaaacacactttctacagaatctgcaagtgcatatttggacctctctgaggaattcgttggaaacgggataatttcagctgactaaacagaagcattctcagaaccatcttcgtgatgtctgcattcaactcacagtgtggaacctttctttgatagttcaggtttgaaacactctttttgtagaaactgcaaggggatcattgcacttctttgaggcctaccgtagtaaagtagataacttcctacaaaaagaagacagaagcattctcagaaccctcttcgtgatgtttgcattcaactcacagtgctgaacctttctttgatagttcagctttgaaacactcttcttgtagaaactgcaagtggatatttggtcctctctgaggatttcgttggaaacgggataaaccgcacagaactaaacagaagaattctcagagccctcttcgtgatgtttgcattcaactcacagtgctgaacctttctttgatagtgcagctttgaaacactctttttgtagaacctgcaagtggatatttggtcctctctgaggatttcgttggaaacgggataaaccgcacagaactaaaacagaagcattgtcagaaacttctttgtgatgattgcattcaactcacagagttgaaggttccttttcaaacagcagtttccaatcactctttctgtggaatctgcaagtggatatttgggcctctctgaggatttcgttggaaacgggataaaacgcacagaactaaaacagaagcattctcagaaacttctctgtgatgtttgtgttcaactcccagagtttcacgttgcttttcatagagtagttctgaaacatgcttttcgtagtgtctgcaagtggacatttggagcgctttcaggtctgtggtggaaaacgaattatggtcacataaaaactggagagaagccttctcagaaacttctctgtgatgattgcattcaactcacagagttgaaccctcctatggatagagcagtgttgaaactctctttttgtggaatctgcaagtggatatgtggacctctccgaagatgtctttggaaacgggaatatcttcacataaaaactaaacagaagcattctcagaaacttcttggtgatgtttgcattcaaatcccagaggtgaaccttcctttgatagttcaggtttgaaacactctttttgtaggatctgcaagtggctatttggaccactctgtggccttcgttcgaaacgggtatatcttcgcataaaatctagacagaagcattctcagaaaatactttgtgatgattgagttgaactcacagagctgaacattcctttggatggagcaggtttgagacacactttttgtagaatctacaagtggatatttggacctctctgaggatttcgctggaaacgggataactgcacctaactaaacggaagcattctcagaaactgctttgtgatgattgcattcacctcacagagttgaacattcctattgatagagcagtttggaaacactcttgttgtggaatgtgcaagtggagatttggagcgctttgaggcctatggtagtaaagggaatagcttcatagaaaaactagacagatgcattctcaggaactttttggtgatgtttgtattcaactcccagagttgaactttcctttggaaagagcagctatgaaacactctttttctagaatctgcaagtggacgtttggagggctttgtggtttgtggtggaaaaggaaatatcttcacctaaatactagatagaagcatcctcagaagcttctctgtgatgactgcattcaactcacggagttgaacactccttttgagagcgcagttttgaaactctctttctgtggcatctgcaaggggacatgtagacctctttgaagatttcgttggaaacggaatcatcttcacataaaaactacacagaagcagtctcagaatcttctttgtgatgtttgcattcaaatccccgagttgaactttcctttcaaagttcacgtttgaaacactctttttgcaggatctacaagtggatatttggaccactctgtgtccttcgttcgaaacgggtatatcttcacatgacatctagacagaagctttctcagaaaattctttgggatgattgagttgaactcacagagctgagcattccttgcgatgtagcagtttagaaacgcactttctgcagaatctgcaagtgcatatttggacctctgtgaggaattcgttggaaacgggataatttcagctgactaaacagaagcattctcagaaccttcttcgtgatgtctgcattcaactcacagtgtggaacctttctttgatagttcaggtttgaaacactctttctgtagaaactgcaaggggataattgcactctttgaggagtaccgtagtaaaggaaataacttcctataaaaagaagacagaagcattctcagaaccctcttcgtgatgtttgcattcaactcacagtgctgaacctttctttgatagttcagctttgaaacactctttttgtagaaactgcaagtggatatttggtcctctctgaggatttcgttggaaacgggataaactgcacagaactaaacagaagcattctcagaaccttcttcgtgatgtttgcattcaactcacagtgttgaacctttctttgatagttcaggtttgaaacggtctttctgtagaaactgcaagtagatatttggacctctctgaggatttcgttggaaacgggataacccgcacagaactaaaacagaagcattcagaaaaaactcttggtgacgactgagtttaactcacagagctgaacattcctttggatggagcagtttcgaaacacactatttgtagaatgtgcaagtggatatttgggcctctctgaggatttcgttggaaacgggataaaccgcacagaactaaacagaagcattctcagaaactactttgtgatgattgcattcaagtaacagagttgaacattccctttgacagagcagtttggaaactctctttgtgtagaatctgcaagtggagatatggaccgctttgaggcctatggtagtaaaggaaatagcttcatataaaagctagacagtagcattctcagaaacttctttgagatgcttgcattcaactcacagagttgaactttcctttcgagagagaagctttgaaacactctttttccagaatctgcaagtggacatttggagggctttgaggcctgtggtggaaaaggaattatcttcccgtaaaagctagatagaagcattgtcagaaacttctttgtgatgattgcattcaactcacagagttgaaggttccttttcaaacagcagtttccaatcactctttctgtggaatctgcaagtggatatttgggcctctctgaggatttcgttggaaacgggataaaacgcacagaactaaaacagaagcattctcagaaacttctctgtgatgtttgtgttcaactcccagagtttcacgttgcttttcatagagtagttctgaaacatgcttttcgtagtgtctgcaagtggacatttggatcgctttcaggcctgtggtggaaaacgaattatggtcacataaaaactggagagaagcattctcagaaaatactttgtgatgattgagtttaaatcacagagctgaccattcctttggatggagcaggtttgagacacactttttgtagaatctacaagtggatatttggacctctctgaggatttcgttggaaacgggataactgcacctaactaaacggaagcattctcagtaaactgctttgtgatgattgcattcacctcacagagttgaacattcctattgatagagcagtttggaaacactcttcttgtggaatgtgcaagtggagatttggagcgctttgaggcctatggtagtaaagggaatagcttcatagaaaaactagacagatgcattctcaggaactttttggtgatgtttgtattcaactcccagagttgaactttcctttggaaagagcagctatgaaacactgtttttctagaatctgcaagtggacgtttggagggctttgtggtttgtggtggaaaaggaaatatcttcacctaaatactagatagaagcatcctcagaagcttctctgtgatgactgcattcaactcacggagttgaacactccttttgagagcgcagttttgaaactctctttctgtggcatctgcaaggggacatgtagacctctttgaaaatttcgttggaaacggaatcatcttcacataaaaactacacagaagcagtctcagaatcttctttgtgatgtttgcattcaaatccccgagttgaactttcctttcaaagttcacgtttgaaacactctttttgcaggatctacaagtggatatttggaccactctgtgtccttcgttcgaaacgggtatatcttcacatgacatctagacagaagctttctcagaaaattctttgggatgattgagttgaactcacagagctgagcattccttgcgatgtagcagtttagaaacacactttctgcagaatctgcaagtgcatatttggacctctgtgaggaattcgttggaaacgggataatttcagctgactaaacagaagcattttcagaaccttcttcgtgatgtctgcattcaagtcacagtgtggaacctttctttgatagttcaggtttgaaacactctttttgtagaaactgcaaggggataattgcactctttgaggagtaccgtagtaaaggaaatatcttcctataaaaagaagacagaagcattctcagaaccctcttcgtgatgtttgcattcaactcacagtgctgaacctttctttgattgttcagctttgaaacactctttttgtagaaactgcaaatggatatttggtcctctctgaggatttcgttggaaaagggataaaacacacagaactaaacagaagcattctcagaaccctcttcgtgatgtttgcattcaactcacagtgttgaacctttctttgatagttcagctttgaaacggtctttctgtagaaaatgcaagtagatatttggacctctctgaggatttcgttggaaacgggataaaccgcacagaacaaaaacagaagcattctcagaaccttcttcgtgatgtttgcattcaactcacagtgttgaacctttctttgatagttcaggttggaaacggtctttctgtagaaactgcaagtagatatttggacctctctgaggatttcgttggaaacgggataaaccgcacagaactaaaacagaagcattcacagaaaactcttggtgacgactgagtttaactcacagagctgaacattcctttggatggagcagtttcgaaacacactatttgtagaatgtgcaagtggatatgtgggcctctctgaggatttcgttggaaacgggataaaccgcacagaactaaacagaagcattctcagaaactactttgtgatgattgcattcaagacacagagttgaacattccctttgacagagcattttggaaactctctttgtgtagaatctgcaagtggagatatggaccgctttgaggcctatggtagtaaaggaaatagcttcatataaaagctagacagtagcattctcagaaacttctttgtgatgcttgcattcaactcacagagttgaactttcctttcgagagagaagctttgaaacactctttttccagaatctgcaagtggacatttggagggctttgaggcctgtcgtggaaaaggaattatcttcccgtaaaagcctagatagaagcattgtcagaaacttctttgtgatgattgcattcaagtcacagagttgaaggttccttttcaaagagcagtttccaatcactctttctgtggaatctgcaagtggatatttggacctctttgaagatttcattggaaacgggataatcttcacagaaaagctaaacagaagcattctcagaaacttctctgtgatgtttgtgttcaactcccagagtttcacattgcttctcatagagtagttctgaaacatgcttttcgtagtgtctgcaagtggacatttggagcgctttcaggcctgtggtggaaaacgaattatggtcacataaaaactggagagaagccttctcaaaaacttctctgtgatgattgcattcaactcacagagttgaaccctcctatggatagagcagtgttgaaactctctttttgtggaatctgcaagcggatatgtggacctctccgaagatgtctttggaaacgggaatatcttcacataaaaactaaacagaagcactctcagaaacttcttggtgatgtttgcattcaaatcccagagttgaaccttcctttgatagttcaggtttgaaacactctttttgtaggatctgcaagtggatatttggaccactctgtggccttcattcgaaacgggtacatcttcgcataaaatctagacagaagcattctcagaaaatactttgtgatgattgactttaactcacagagctgaacattcctttggatggagcaggcttgagacacactttttgtagaatctacaagtggatatttggacctctctgaggatatcgttggaaacgggataactgcaccttactaagtggaagcattctcagaaactgctttgtgatgattgcattcacctcacagagttgaacattcctattgatagagcagtttggaaacactcttgttgtggaatgtgcaagtggagatttggagcgctttgaggcctatggtagtaaagggaatagcttcatagaaaaactagacagatgcattctcaggaactttttggtgatgtttgtattcaactcccagagttgaactttcctttggaaagagcagctatgaaacactgtttttctagaatctgcaagtggacgtttggagggctttgtggtttgtggtggaaaaggaaatatcttcacctaaatactagatagaagcattctcagaagcttctctgtgatgactgcattcaactcacggagttgaacactccttttgagagtgcagttttgaaactctctttctgtggcatctgcaaggggacatgtagacctctttgaagatttcgttggaaacggaatcatcttcacataaaaactatacagaagcagtctcagaatcttctttgtgatgtttgcattcaaatccctgagttgaattttcctttcaaagttcacgtttgaaacactctttttgcaggatctacaagtggatatttggaccactctgtgtccttcgttcgaaacgggtatatcttcacatgacatctagacagaagctttctcagaaaattctttgggatgattgagtggaactcacagagctgaacattccttgcgatgtagcagtttagaaacacactttctgcagaatctgcaagtgcatatttggacctctctgaggaattcgttggaaacgggataatttcagctgactaaacagaagcattctcagaaccttcttcgtgatgtctgcattcaactcacagtgtggaacctttctttgatagttcaggtttgaaacactctttttgtagaaactgcaaggggataattgcacttctttgaggcctaccgtagtaaagggaataacttcctatagaaagaagacagaagaattctcagagccctcttcgtgatgtttgcattcaaatcacagtgctgaacctttctttgatagtgcagctttgaaacactctttttgtagaaactgcaagtggatatttggtcctctctgaggatttcgttggaaacgggataaaccgcacagaactaaacagaagcattctcagaaccttcttcgtgatgtttgcattcaactcacagtgttgaacctttctttgatagttcaggtttgaaacggtctttctgtagaaactgcaagtagatatttggacctctctgaggatttcgttggaaacgggataacccgcacagaactaaaacagaagcattcacagaaaactcttggtgacgactgagtttaactcacagagctgaacattcctttggatggagcagtttcgaaacacactattggtagaatgttcaagtggatatgtgggcctctctgaggatttcgttggaaacgggataaaccgcacagaactaaacagaagcattctcagaaactactttgtgatgattgcattcaagtcacagagttgaacattccctttgacagagcagtttggaaactctctttgtgtagaatctgcaagtggagatatggaccgctttgaggcctacggtagtaaaggaaatagcttcatataaaagctagacagtagcattctcagaaacttctttgtgatgcttgcattcaactcacagagttgaactttcctttcgagagagaagctttgaaacactctttttccagaatctgcaagtggacatttggagggctttgaggcctgtggtggaaaaggaattatcttcccgtaaaagctagatagaagcattgtcagaaacttctttgagatgattgcattcaactcacagagttgaaggttccttttcaaacagcagtttccaatcactctttctgtggaatctgcaagtggatatttcgacctctttgaagatttcgttggaaacgggagaatcttcacagaaaagctaaacagaagcattctcagaaacttctctgtgatgtttgtgttcaactcccagagtttcacgttgcttttcatagagtagttctgaaacatgcttttcgtagtgtctgcaagtggacatttggagcgctttcaggcctgtggtggaaaacgaattatggtcacataaaaactggagagaagccttctcagaaacttttctgtggtgattgcattcaactcacagagttgaaccctcctatggatagagcagtgttgaaactctctttttgtggaatctgcaagtggatatgtggacctctccgaagatgtctttggaaacgggaatatcttcacataaaaactaaacagaagcattctcagaaacttcttggtgatgtttgcattcaaatcccagagttgaaccttcctgtgatagttcaggtttgaaacactctttttgtaggatctgcaagtggatatttggaccactctgtggccttcgttcgaaacgggtacatcttcacataaaatctagacagaagcattctcagaaaatactttgtgatgattgagtttaactcacagagctgaacattcctttggatggagcaggtttgagacacactttttgtagaatctacaagtggatatttggacctctctgaggatttcgttggaaatgggataactgcacctaactaaacggaagcattctcagaaactgctttgtgatgattgcattcacctcacagagttgaacattcctattgatagagcagtttggaaacactcttgttgtggaatgtgcaagtggagatttggagcgctttgaggcctatggtagtaaagggaatagcttcatagaaaaactagacagatgcattctcaggaactttttggtgatgtttgtattcaactcccagagttgaactttcgtttggaaagagcagctatgaaacactctttttctagaatctgcaagtggacgtttggagggctttgtggtttgtggtggaaaaggaaatatcttcacctaaatactagatagaagcattctcagaagcttctctgtgatgactgcattcaactcacggagttgaacactccttttgagagcgcagttttgaaactctctttctgtggcatctgcaaggggacatgtagacctctttgaagatttcgttggaaacggaatcatcttcacataaaaactatatagaagcagtctcagaatcttctttgtgatgtttgcattcaaatcccagagttgaactttcctttcaaagttcacgtttgaaacactctttttgcaggatctacaagtggatatttggaccactctgtgtccttcgttcgaaacgggtatatcttcacacgacatctagacagaagctttctcagaaaattctttgggatgattgagtggaactcacagagctgaacattccttgcgatgtagcactttagaaacacactttctgcagaatctgcaagtgcatatttggacctctctgaggaattcgttggaaacgggataatttcagctgactaaacagaagcattctcagaaccttcttcgtgatgtctgcattcaactcacagtgtggaacctttctttgatagttcaggtttgaaacactctttttgtagaaactgcaaggggataattgcacttctttgaggcctaccgtagtaaaggaaataacttcctatagaaagaagacagaagcattctcagaaccctcttcgtgatgtttgcattcaactcacagtgctgaacctttctttgatagttcagctttgaaacactcttcttgtagaaactgcaagtggatatttggtcctctgtgaggatttcgttggaaacgggataaaccgcacagaactaaacagaagcattctcagagccctcttcgtgatgtttgcattgaactcacggtgctgaacctttctttgatagtgcagctttgaaacactgtttttgtagaaactgcaagtggatgtttggtcctctctgaggatttcgttggaaacgggataaaccgcacagaactaaaacagaagcattctcagaaccttcttcgtgatgtttgcattcaactcacagtgttgaacctttctttgatagttcaggtttgaaacggtctttctgtagaaactgcaagtagatatttggacctctctgaggatttcgttggaaacgggataacccgcacagaactaaaacagaagcattcacagaaaactcttggtgacgactgagtttaactcacagagctgaacattcctttggatggagcagtttcgaaacacactatttgtagaatctgcaagtggatatttgggcctctctgaggatttcgttggaaacgggataaaacgcacagaactaaaacagaagcattctcagaaactactttgtgatgattgcattcaagtcacagagttgaacattccctttgacagagcagtttggaaactctcttggtgtagaatctgcaagtggagatatggaccgctttgaggcctatggtagtaaaggaaatagcttcatataaaagctagacagtagcattctcagaaacttctttgtgatgcttgcattcaactcacagagttgaactttcctttcgagagagaagctttgaaacactctttttccagaatgtgcaagtggacatttggggagctttgaggcctgtggtggaaaaggaattatcttcccgtaaaagctagatagaagcattgtcagaaacttctttgtgatgattgcattcaactcacagagttgaaggttccttttcaaacagcagtttccaatcactctttctgtggaatctgcaagtggatatttcgacctctttgaagatttcattggaaacgggagaatcttcacagaaaagctaaacagaagcattctcagaaacttctctgtgatgtttgtgttcaactcccagagtttcacgttgcttttcatagagtagttctgaaacatgcttttcgtagtgtctgcaagtggacatttggagcgctttcaggcctgtggtggaaaacgaattatggtcacataaaaactggagagaagccttctcagaaacttctctgtgatgattgcattcaactcacagagttgaaccctcctatggatagagcagtgttgaaactctctttttgtggaacctgcaagtggatatgtggacctctccgaagatgtctttggaaacgggaatatcttcacataaaaactaaacagaagcattctcagaaacttcttggtgatgtttgcattcaaatcccagagttgaaccttcctttgatagttcaggtttgaaacactctttctgtaggatctgcaagtggctatttggaccactctgtggccttcgttcgaaacgggtatatcttcgcataaaatctagacagaagcattctcagaaaatactttgtgatgattgagtttaaatcacagagctgaccattcctttggatggagcaggtttgagacacactttttgtagaatctacaagtggatatttggacctctctgaggatttcgttggaaacgggataactgcacctaactaaacggaagcattctcagaaactgctttgtgatgattgcattcacctcacagagttgaacattcctattgatagagcagtttggaaacactcttgttgtggaatgtgcaagtggagatttggagcgctttgaggcctatggtagtaaagggaatagcttcatagaaaaactagacagatgcattctcaggaactttttggtgatgtttgtattcaactcccagagttgaactttcctttggaaagagcagctatgaaacactctttttctagaatctgcaagtggacgtttggagggctttgtggtttgtggtggaaaaggaaatatattcacctaaatactagatagaagcattctcagaagcttctctgtgatgactgcattcaactcacggagttgaacactccttttgagagcgcagttttgaaactctctttctgtggcatctgcaaggggacatgtagacctctttgaagatttcgttggaaacggaatcatcttcacataaaaactatacagaagcagtctcagaatcttctttgtgatgtttgcattcaaatcccagagttgaactttcctttccaagttcacgtttgaaacactctttttgcaggatctacaagtggatatttggaccactctgtgtccttcgttcgaaacgggtatatcttcacatgacatctagacagaagctttctcagaaaattctttgggatgattgagttgagcaaacagagctgaacactccttgcgatgtagcagtttagaaacacactttctgcagaatctgcaagtgcatatgtggacctctctgaggaattcgttggaaacgggataatttcagctgactaaacagaagcattctcagaacttcttcgtgatgtctgcattcaactcacagtgtggaacctttctttgatagttcaggtttgaaacactctttttgtagaaactgcaaggggatcattgcacttctttgaggcctaccgtagtaaaggagataacttcctataaaaagaagacagaagcattctcagaaccctcttcgtgatgtttgcattcatctcacagtgctgaatctttctttgatagttcagctttgaaacactcttcttgtagaaactgcaagtggatatttggtcctctctgaggatttcgttggaaacgggataaaccgcacagaactaaacagaagcattctcagaaccttcttcgtgatgtttgcattcaactcacagtgttgaacctttctttgatagttcaggtttgaaacggtctttctgtagaaactgcaagtagatatttggacctctctgaggatttcgttggaaacgggataacccgcacagaactaaaacagannnnnnnnnnnnnnnnnnnnnnnnnnnnnnnnnnnnnnnnnnnnnnnnnnnnnnnnnnnnnnnnnnnnnnnnnnnnnnnnnnnnnnnnnnnnnnnnnnnnccataaaaatgatgagttcatatcctttgtagggacatggatgaaattggaaaccatcattctcagtaaactaacacaagaaaaaaaaaccaaacaccgcatattctcactcataggtgggaattgaacaatgagatcacatggacacaggaaggggaatatcacactctggggactgtggtggggtcgggggagtggggagggatagcattgggagatatacctaatgctagatgacacattagtgggtgcagcgcaccagcatggcacatgtatacatatgtaactaacctgcacaatgtgcacatgtaccctaaaacttagagtataataaaaaaaaaaaaaaaagaaatatacaaaaaaaaaaaaaacaaaaaaaaacaaaaaaaaaacaaagaaaggttcagcactgtgagttgaatgcaaacatcatgaaaagggttctgaaaatgcttcagcattctcagaaactactttgtgatgattgcattcaagtcacagagttgaacattccctttgacagagcagtttggaaactctctttgtgtagaatctgcaagtggagatatggacctctttgtggcctatggtagtaaaggaaatagcttcatataaaagctagacagtagcattctcagaaacttctttgtgatgcttgcattcaactcacagagttgaactttcctttcgagagagaagctttgaaacactctttttccagaatctgcaagtggacatttggagggctttgaggcctgtggtggaaaaggaattatcttcccgtaaaagctagatagaagcattgtcagaaacttctttgtgatgattgcattcaactcacagagttgaaggttccttttcaaagagcagtttccaatcactctttctgtggaatctgcaactggatatttggacctctttgaagatttcgttggaaacgggagaatcttcacagaaaagctaaacagaagcattctcagaaacttctctgtgatgtttgtgttcaactcccagagtttcacgttgcttttcatagagtagttctgaaacatgcttttcgtagtgtctgcaagtggacatttggagcgctttcaggcctgtggtggaaaacgaattatggtcacataaaaactggagagaagccttctcagaaacttctctgtgatgattgcattcaactcacagagttgaaccctcctatggatagagcagtgttgaaactctctttttgtggaatctgcaagtggatatgtggacctctccgaagatgtctttggaaacgggaatatcttcacataaaaactaaacagaagcattctcagaaacttcttggtgatgtttgcattcaaatcccagagttgaaccttcctttgatagttcaggtttgaaacactctttctgtaggatctgcaagtggctatttggaccactctgtggccttcgttcgaaacgggtatatcttcgcataaaatctagacagaagcattctcagaaaatactttgtgatgattgagtttaaatcacagagctgaacattcctttggatggagcaggtttgagacacactttttgtagaatctacaagtggatatttggacctctctgaggatttcgttggaaacgggataactgcacctaactaaacggaagcattatcagaaactgctttgtgatgattgcattcacctcacagagttgaacattcctattcatagagcagtttggaaacactcttgttgtggaatgtgcaagtggagatttggagcgctttgaggcctatggtagtaaagggaatagcttcatagaaaaactagacagatgcattctcaggaactttttggtgatgtttgtattcaactcccagagttgaactttcctttggaaagagcagctatgaaacactctttttctagaatctgcaagtggacgtttggagggctttgtggtttgtggtggaaaaggaaatatcttcacctaaatactagatagaagcattctcagaagcttctctgtgatgactgcattcaactcacggagttgaacactccttttgagagcgcagttttgaaactctctttctgtggcatccgcaaggggacatgtggacctctttgaagatttcgttggaaacggaatcatcttcacatcaaaactatacagaagcagtctcagaatcttctttgtgatgtttgcattcaaatcccagagttgaactttcctttcaaagttcacgtttgaaacactctttttgcaggatctacaagtggatatttggaccactctgtgtccttcgttcgaaacgggtatatcttcacacgacatctagacagaagctttctcaggaaaattctttgggatgattgagtggaactcacagtgctgaacattccttgcgatgtagcagtttagaaacacactttctgcagaatctgcaagtgcatatttggacctctctgaggaattcgttggaaacgggataatttcagctgactaaacagaagcattctcagaaccttcttcgtgatgtctgcattcaactcacagtgtggaacctttctttgatagttcaggtttgaaacactctttttgtagaaactgcaaggggataattgcacttctttgaggcctaccgtagtaaaggaaataacttcctatagaaagaagacagaagcattctcagaaccctcttcgtgatgtttgcattcaactcacagcgctgaaactttctttgatagttcagctttgaaacactcttcttgtagaaactgcaagtggatatttggtcctctctgaggatttcgttggaaacgggataaaccgcacagaactaaacagaagcattctcagaaccttcttcgtgatgtttgcattcaactcacagtgttgaacctttctttgatagttcaggtttgaaacggtctttctgtagaaactgcaagaagatatttggacctctctgaggatttcgttggaaacgggataaaccgcacagaactaaaacagaagcattcacagaaaactcttggtgacgactgagtttaactcacagagctgaacattcctttggatggagcagtttcgaaacacactatttgtagaatgtgcaagtggatatttgggcctctctgaggatttcgttggaaacgggataaaccgcacagaactaaacagaagcattctcagaaactactttgtgatgattgcattcaagtcacagagttgaacattccctttgacagagcagtttggaaactctctttgtgtagaatctgcaagtggagatatggaccgctttgaggcctatggtagtaaaggaaatagcttcatataaaagctagacagtagcattctcagaaacttctttgtgatgcttgcattcaactcacagagttgaactttcctttcgagagagaagctttgaaacactctttttccagaatctgcaagtggacatttggagggctttgaggcctgtggtggaaaaggaattatcttcccgtaaaagctagatggaagcattgtcagaaacttctttgtgatgattgcattcaactcacagagttgaaggttccttttcaaagagcagtttccaatcactctttgtgtggaatctgcaagtggatatttggacctattttgaagatttcgttggaaacgggagaatcttcacaggaaagctaaacagaagcattctcagaaacttctctgtgatgtttgtgttcaactcccagagtttcacattgcttttcatagagtagttctgaaacatgcttttcgtagtgtctacaagtggacatttggagcgctttcaggcctgtggtggaaaacgaattatggtcacataaaaactggagagaagccttctcagaaacttctctgtgatgattgcattcaactcacagagttgaacccttctatggatagagcagtgttgaaactctctttttgtggaatctgcaagtggatatgtggacctctccgaagatgtctttggaaacgggaatatcttcacataaaaactaaacagaagcattctcagaaacttcttggtgatgtttgcattcaaatcccagagttgaaccttcctttgatagttcaggtttgaaacactctttttgtaggatctgcaagtggatatttggaccactctgtggccttcgttcgaaacgggtatatcttcgcataaaatctagacagaagcattctcagaaaatactttgtgatgattgagttaaaatcacagagctgaacattcctttggatggagcaggtttgagacacactttttgtagaatctacaagtggatatttggacctctctgaggatttcgttggaaacgggataactgcacctaactaaacggaagcattctcagaaactgctttgtgatgattgcattcacctcacagagttgaacattcctattgatagagcagtttggaaacactcttgttgtggaatgtgcaagtggagatttggagcgctttgaggcctatggtagtaaagggaatagcttcatagaaaaactagacagatgcattctgaggaactttttggtgttgtttgtattcaactcccagagttgaactttcctttggaaagagcagctatgaaacactctttttctagaatcagtaagtggacgtttggagggctttgtggtttgtggtggaaaaggaaatatcttcacctaaatagtagatagaagcattctcagaagcttctctgtgatgactgcattcagctcacagagttgaacactccttttgagagcgcagttttgaaactctctttctgtggcatctgcaaggggacatgtagacctctttgaagatttcgttggaaacggaatcatcttcacataaaaactatacagaagcagtctcagaatcttctttgtgatgtttgcattcaaatcccagagttgaacttccctttcaaagttcacgtttgaaacactctttttgcaggatgtacaagtggatatttggagcactctgtgtccttcgttcgaaacgggtatatcttcacatgacatctagacagaagctttctcagaaaattctttgtgatgattgagttgagcaaacagagctgaacactccttgcgatgtagcagtttagaaacacactttctgcagaatctgcaagtgcatatgtggacctctctgaggaattcgttggaaacgggataatttcagctgactaaacagaagcattctcagaaccttcttcgtgatgtctgcattcaactcacagtgtggaacctttctttgatagttcaggtttgaaacactctttttgtagaaactgcaaggggatcattgcacttctttgaggcctaccgtagtaaaggagataacttactataaaaagaagacagaagaattctcagagccctcttcgtgatgtttgcattcaactcacagtgctgaacctttctttgatagtgcagctttgaaacactctttttgtagaaactgcaagtggatgtttggtcctctctgaggatttcgttggaaacgggataaaccgcacagaactaaaacagaagcattgtcagaaacttctttgtgatgattgcattcaactcacagagttgaaggttccttttcaaacagcagtttccaatcactctttctgtggaatctgcaagtggatatttgggcctctctgaggatttcgttggaaacgggataaaacgcacagaactaaaacagaagcattctcagaaacttctctgtgatgtttgtgttcaactcccagagtttcacgttgcttttcatagagtagttctgaaacatgcttttcgtagtgtctgcaagtggacatttggagcgctttcaggcctgtggtggaaaacgaattatggtcacataaaaactggagagaagccttctcagaaacttctctgtgatgattgcattcaacacacagagttgaaccctcctatggatagagcagtgttgaaactctgtttttgtggaatctgcaagtggatatgtggacctcgccgaagatgtctttggaaacgggaatatcttcacataaaaactaaacagaagcattctcagaaacttcttggtgatgtttgcattcaaatcccagagttgaaccttcctttgatagttcaggtttgaaacactctttttgtaggatctgcaagtggatatttggaccactctgtggccttcgttcgaaacgggtatatcttcgcataaaatctagacagaagcattctcagaaaatactttgtgatgattgagtttaactcacagagctgaacattcctttggatggagcaggtttgagacacactttttgtagaatctacaagtggatatttggacctctctgaggatttcgttggaaacgcgataactgcacctaactaaacggaagcattctcagaaactgctttgtgatgattgcattcacctcacagagttgaacattcctattgatagagcagtttggaaacactcttgttgtggaatgtgcaagtggagatttggagcgctttgaggcctatggtagtaaagggaatagcttcatagaaaaactaggcagatgcattctcaggaactttttggtgatgtttgtattcaactcccagagttgaactttcctttggaaagagcagctatgaaacactctttttctagaatctgcaagtggacgtttggagggctttgtggtttgtggtggaaaaggaaatatcttcacctaaatactagatagaagcattctcagaagcttctctgtgatgactgcattcaactcacggagttgaacactccttttgagagcgtagttttgaaactctctttctgtggcatctgcaaggggacatgtagacctctttgaagatttcgttggaaacggaatcatcttcacataaaaactatacagaagcagtctcagaatcttctttgtgatgtttgcattcaaatcccaggagttgaactttcctttcaaagttcacgtttgaaacactctttttgcaggatctacaagtggatatttggaccactctgtgtccttcgttcgaaacgggtataacttcacacgacatctagacagaagctttctcagaaaattctttgggatgattgagttgaggaaacagagctgaacactccttgtgatgtagcagtttagaaacacactttctgcagaatctgcaagtgcatatttggacctctctgaggaattcgttggaaacgggataatttcagctgactaaacagaagcattctcagaaccttcttcgtgatgtctgcattcaactcacaagtgtggaacctttctttgatagttcaggtttgaaacactctttttgtagaaactgcaaggggataattgcacttctttgaggcctaccgtagtaaaggaaataacttcctatagaaagaagacagaagcattctcagaaccctgcttcgtgatgtttgcattcaactcacagtgctgaacctttctttgatagttcagctttgaaacactctttttgtagaaactgcaagtggatatttggtcctctctgaggatttcgttggaaacgggataaactgcacagaactaaacagaagcattctcagaaccttcttcgtgatgtttgcattcaactcacagtgttgaacctttctttgatagttcaggtttgaaacggtctttctgtagaaactgcaagtagatatttggacctctctgaggatttcgttggaaacgggataacccgcacagaactaaaacagaagcattcacagaaaactcttggtgacgactgagtttaactcacagagctgaacattcctttggatggagcagtttcgaaacacactatttgtagaatgtgcaagtggatatttaggcctctctgaggatttcgttggaaacgggataaaccgcacagaactaaacagaagcattctcagaaactactttgtgatgattgcattcaagtcacagagttgaacattccctttgacagagcagtttggaaactctctttgtgtagaatctgcaagtggagatatggaccgctttgaggcctatggtagtaaaggaaatagcttcatataaaagctagacagtagcattctcagaaacttctttgtgatgcttgcattcaactcacagagttgaactttcctttcgagagagaagctttgaaacactctttttccagaatctgcaagtggacatttggagggctttgaggcctgtggtggaaaaggaattatcttctcgtaaaagctagatagaagcattgtcagaaacttctttgtgatgattgcattcaactcacagagttgaaggttccttttcaaacagcagtttccaatcactctttctgtggaatctgcaagtggatatttggacctattttgaagatttcgttggaaacgggataatcttcacagaaaagctaaacagaagcattctcagaaacttctctgtgatgtttgtgttcaactcccagagtttcacattgcttttcatagagtagttctgaaacatgcttttcgtagtgtctgcaagtggacatttggagcgctttcaggcctgtggtggaaaacgaattatggtcacataaaaactggagagaagccttctcagaaacttctctgtgatgattgcattcaactcacagagttgaaccctcctatggatagagcagtgttgaaactctctttttgtggaatctgcaagtggatatgtggacctctccgaagatgtctttggaaacgggaatatcttcacataaaaactaaacagaagcattctcagaaacttcttggtgatgtttgcattcaaatcccagagttgaaccttcctttgatagttcaggtttgaaacactctttttgtaggatctgcaagtggctatttggaccactctgtggccttcgttcgaaacgggtatatcttcgcataaaatctagacagaagcattctcagaaaatactttgtgatgattgagtttaactcacagagctgaacattcctttggatggagcaggtttgagacacactttttgtagaatctaaaagtggatatttggacctctctgaggatttcgttggaaacgcgataactgcacctaattaaacggaagcattctcagaaactgctttgtgatgattgcattcacctcacagagttgaacattcctattgatagagcagtttggaaacactcttgttgtggaatgtgcaagtggagacttggagcgttttgaggcctatggtagtaaagggaatagcttcatagaaaaactagacagatgcattctcaggaactttttggtgatgtttgtattcaactcccagagttgaactttcctttggaaagagcagctatgaaacactctttttctagaatctgcaagtggacgtttggagggctttgtggtttgtggtggaaaaggaaatatcttcacctaaatactagatagaagcattctcagaagcttctctgtgatgactgcattcaactcacggagttgaacactccttttgagagcgcagttttgaaactctgtttctgtggcatctgcaaggggacatggagacctctttgaagatttcgttggaaacggaatcatcttcacataaaaactatacagaagcagtctcagaatcttctttgtgatgtttgcattcaaatcccagagttgaactttcctttcaaagttcacgtttgaaacactctttttgcaggatctacaagtggatatttggaccactctgtgtccttcgttcgaaacgggtatatcttcacatgacatctagacagaagctttctcagaaaattctttgggatgattgagtggaactcacagagctgaacattccttgcgatggagcagtttagaaacacactttctgcagaatctgcaagtgcatatttggacctctctgaggaattcgttggaaacgggataatttcagctgactaaacagaagcattctcagaaccttcttcgtgatgtctgcattcaactcacagtgtggaacctttctttgatagttcaggtttgaaacactctttttgtagaaactgcaaggggataattgcacttctttgaggcctaccgtagtaaaggaaataacttcctatagaaagaagacagaagcattctcagaaccctcttcgtgatgtttgcattcaactcacagtgctgaacctttctttgatagttcagctttgaaacactcttcttgtagaaactgcaagtggatatttggtcctctctgaggatttcgttggaaacgggataaaccgcacagaactaaacagaagaattctcagagccctcttcgtgatgtttgcattcaactcacagtgctgaacctttctttgatagtgcagctttgaaacactctttttgtagaaactgcaagtggatatttggtcctctctgaggatttcgttggaaacgggataaaccgcacagaactaaaacagaaaagcattgtcagaaacttctttgtgatgattgcattcaactcacagagttgaaggttccttttcaaacagcagtttccaatcactctttctgtggaatctgcaagtggatatttgggcctctctgaggatttcgttggaaacgggataaaacgcacagaactaaaacagaagcattctcagaaacttctctgtgatgtttgtgttcaactcccagagtttcacgttgcttttcatagagtagttctgaaacatgcttttcgtagtgtctgcaagtggacatttggagcgctttcaggcctgtggtggaaaacgaattatggtcacataaaaactggagagaaagccttctcagaaacttctctgtgatgattgcattcaactcacagagttgaaccctcctatggatagagcagtgttgaaactctctttttgtggaatctgcaagtggatatgtggacctctccgaagatgtctttggaaacgggaatatcttcacataaaaactaaacagagcattctcagaaacttcttggtgatgtttgcattcaaatcccagagttgaaccttcctgtgatagtacaggtttgaaacactctttttgtaggatctgcaagtggatatttggaccactctgtggccttcgttcgaaacgggtacatcttcacataaaatctagacagaagcattctcagaaaatactttgtgatgattgagtttaactcacagagctgaacattcctttggatggagcaggtttgagacacaccttttgtagaatctacaagtggatatttggacctctcctgaggatttcgttggaaacgggataactgcacctaactaaacggaagcattctcagaaactgctttgtgatgattgcattcacctcacagagttgaacattcctattgatagagcagtttggaaacactcttgttgtggaatgtgcaagtggagatttggagcgctttgaggcctatggtagtaaagggaatagcttcatagaaaaactagacagatgcattctcaggaactttttggtgatgtttgtattcaactcccagagttgaactttcctttggaaagagcagctatgaaacactctttttctagaatctgcaagtggacgtttggagggctttgtggtttgtgttggaaaaggaaatatcttcacctaaatactagatagaagcattctcagaagcttctctgtgatgactgcattcaactcacggagttgaacactccttttgagagcgcagttttgaaactctctttctgtggcatctgcaaggggacatgtagacctctttgaagatttcgttggaaacggaatcatcttcacatcaaaactatacaaaagcagtcccagaatcttctttgtgatgtttgcattcaaatcccagagttgaactttcctttccaagttcacgtttgaaacactctttttgcaggatctacaagtggatatttggaccactctgtgtccttcgttcgacacgggtttatcttcacatgacatctaaacagaagctttctcagaaaattctttgggatgattgagttgagcaaacacagctgaacactccttgcgatgtagcagtttagaaacacacttcctgcagaatctgcaagtgcatatgtggacctctctgaggaattccttggaaacgggataatttcagctgactaaacagaagcattctcagaaccttcttcgtgatgtctgcattcaactcacagtgtggaacctttctttgatagttcaggtttgaaacactctttttgtagaaattgcaaggggataattgcacttctttgaggcctaccgtagtaaaggaaataacttcctataaaaagaagacagaagcattctcagaaccctcttcgtgatgtttgcattcaactcacagtgctgaacctttctttgatagttcagctttgaaacactctttttgtagaaactgcaagtggatatttggtcctctctgaggatttcgttggaaaagggataaaccgcacagaactaagcagaagcattcacagaaaactcctggtgacgactgagtttaactcacagagctgaacattcccttgtttggagcagtttcgaaacacactctttgtagaatctgcaggtggatatttgggcctctctgaggatttcgttggaaacgggataaaccgcacagaactaaaacagaagcattctcagaaactactttgtgatgattgcattcaagtcacagagttgaacattccctttgacagagcagtttggaaactctctttgtgtagaatctgcaagtggagatatggaccgctttgaggcctatggtagtaaaggaaatagcttcatataaaacctagacagtagcattctcagaaacttctttgtgatgcttgcattcaactcacagagttgaactttcctttcgagagagaagctttgaaacactctttttccagaatctgcaagtggacatttggagggctttgaggcctgtggtggaaaaggaattatcttcccgtaaaagctagatagaagcattgtcagaaacttctttgtgatgattgcattcaactcacagagttgaaggttccttttcaaacagcagtttccaatcactctttctgtggaatctgcaagtggatatttcgacctctttgaagatttcgttggaaacgggagaatcttcacagaaaagctaaacagaagcattctcagaaacttctctgtgatgtttgtgttcaactcccagagtttcacgttgcttttcatagagtagttctgaaacatgcttttcgtagtgtctgcaagtggacatttggagcgctttcaggcctgtggtggaaaacgaattatggtcacataaaaactggagagaagccttctcagaaacgtctctgtgatgattgcattcaactcacagagttgaaccctcctatggatagagcagtgttgaaactctctttttgtggaacctgcaagtggatatgtggacctctccgaagatgtctttggaaacgggaatatcttcacataaaaactaaacagaagcattctcagaaacttcttggtgatgtttgcattcaaatcccagagttgaaccttcctttgatagttcaggtttgaaacactctttctgtaggatctgcaagtggctatttggaccactctgtggccttcgttcgaaacgggtatatcttcgcataaaatctagacagaagcattctcagaaaatactttgtgatgattgagtttaaatcacagagctgaccattcctttggatggagcaggtttgagacacactttttgtagaatctacaagtggatatttggacctctctgaggatttcgttggaaacgggataactgcacctaactaaacggaagcattctcagaaactgctttgtgatgattgcattcacctcacagagttgaacattcctattgatagagcagtttggaaacactcttgttgtggaatgtgcaagtggagatttggagcgctttgaggcctatggtagtaaagggaatagcttcatagaaaaactagacagatgcattctcaggaactttttggtgatgtttgtattcaactcccagagttgaactttcctttggaaagagcagctatgaaacactctttttctagaatctgcaagtggacgtttggagggctttgtggtttgtggtggaaaaggaaatatcttcacctaaatactagatagaagcattctcagaagcttctctgtgatgactgcattcaactcacggagttgaacactccttttgagagcgcagttttgaaactctctttctgtggcatctgcaaggggacatgtagacctctttgaagattttgttggaaacggaatcatcttcacataaaaactatacagaagcagtctcagaatcttctttgtgatgtttgcattcaaatcccagagttgaactttcctttcaaagttcacgtttgaaacactctttttgcaggatctacaagtggatatttggaccactctgtgtccttcgttcgaaacgggtatatcttcacacgacatctagacagaagctttctcagcaaaattctttgggatgattgagtggaactcacagagctgaacattccttgcgatgtagcagtttagaaacacactttctgcagaatgtgcaagtgcatatttggacctctctgaggaattcgttggaaacgggataatttcagctgactaaacagaagcattctcagaaccttcttcgtgatgtctgcattcaactcacagtgtggaacctttctttgatagttcaggtttgaaacactctttttgtagaaactgcaaggggataattgcacttctttgaggcctaccgtagtaaaggaaataacttcctataaaaagaagacagaagcattctcagaaccctcttcgtgatgtttgcattcaacacacagtgctgaacctttctttgatagttcagctttgaaacactctttttgtagaaactgcaactggatatttggtcctctctgaggatttcgttggaaatgggataaaccgcacagtactaaacagaagcattcacagaaaactcttggtgacgactgagtttaacccacagagctgaacattcctttggatggagcagtttcgaaacacactatttgtagaatttgcaagtggatatgccttggcctctctgaagatttcgttggaaacgggataaaccgcacagaactaaaacagaagcattctcagaaactactttgtgatgattgcattcaagtcacagagctgaacattccctttgacagagcagtttggtaactctctttgtgtagaatctgcaagtggagatatggaatgctttgaggactatggtagtaaaggaaatagcttcatataaaagttagacagtagcattctcagaaacttctttgtgatgcttgcattcaactcacagagttgaactttcctttcgagagagaagctttgaaacactctttttccagaatgtgcaagtggacatttggggagctttgaggcctgtggtggaaaaggaattatcttcccgtaaaagctagatagaagcattgtcagaaacttctttgtgatgattgcattcaactcacagagttgaaggttccttttcaaagagcagtttccaatcactctttctgtggaatctgcaagtggatatttcgacctctttgaagatttcgttggaaacgggagaatcttcacagaaaagctaaacagaagcattctcagaaacttctctgtgatgtttgtgttcaactcccagagtttcacattgcttttcatagagtagttctgaaacatgcttttcgtagtgtctacaagtggacatttggagcgctttcaggcctgtggtggaaaacgaattatggtcacataaaaactggagagaagccttctcagaaacttctctgtgatgattgcattcaactcacaggtttgaaccctcctatggatagagcattgttgaaactctctttttgtggaatctgcaagtggatatgtggacctctccgaagatgtctttggaaacgggaatatcttcacataaaaactaaacagaagcattctcagaaacttcttggtgatgtttgcattcaaatcccagagttgaaccttcctgtgatagttcaggtttgaaacactctttttgtaggatcttcaagtggatatttggaccactctgtggccttcgttcgaaacgggtacatcttcacataaaatctagacagaagcattctcagaaaatactttgtgatgattgagtttaactcacagagctgaacattcctttggatggagcaggtttgagacacactttttgtagaatctacaagtggatatttggacctctctgaggatttcgttggaaacgggataactgcacctaactaaacggaagcattctcagaaactgctttgtgatgattgcattcacttcacagactagaacattccaattgatagagcagtttggaaacactcttgttgtggaatgtgcaagtggagatttggagcgctttgaggcctatggtagtaaagggaatagcttcatacaaaaagtagacagatgcattctcaggaactttttggtgatgttagtattcaactcccagagttgaactttcctttggaaagagcagctatgaaacactctttttctagaatctgcaagtggacgtttggagggctttgtggtttgtggtggaaaaggaaatatcttcacctaaatactagatagaagcattctcagaagcttctctgtgatgactgcattcaactcacggagttgaacactccttttgagagcgcagttttgaaactctctttctgtggcatctgcaaggggacatgtagacctctttgaagatttcgttggaaacggaatcatctttacatcaaaactatacagaagcagtctcagaatcttctttgtgatgtttgcattcaaatcccagagttgaacttgcctttcaaagttcacgtttgaaacactctttttgcaggatctacaagtggatatttggaccactctgtgtccttcgttcgaaacgggtatatcttcacatgacatctagacagaagctttctcagaaaattctttccgatgattgagttgagcaaacagagctgaacactccttgcgatgtagcagtttagaaacacactttctgcagaatctgcaagtgcatatgtggacctctctgaggaattcgttggaaacgggataatttcagctgactaaacagaagcattctcagaaccttcttcgtgatgtctgcattcaactcacagtgtggaacctttctttgatagttcaggtttgaaacactctttttgtagaaactgcaaggggatcattgcacttctttgaggcctaccgtagtaaaggaaataacttcctataaaaagaagacagaagcattctcagaaccctcttcgtgatgtttgcattcaactcacggtgctgaacctttctttgatagttcagctttgaaacactctttttgtagaaactggaagtggatatttggtcctctctgaggatttcattggtaacgggataaaccgcacagaactaaacagaagcattctcagaaccttcttcgtgatgtttgcattcaactcacagtgttgaacctttctttcatagttcaggtttgaaacggtctttctgtagaaactgcaagtagatatttggacctctctgaggatttcgttggaaacgggataaaccgcacagaactaaaacagaagcattcacagaaaactcttggtgacgactgagtttaactcacagagctgaacattcctttggatggagcagtttcgaaacacactatttctagaaggtgcaagtggatatgtgggcctctctgaggatttcgttggaaacgggataaaccgcagagaactaaacagaagcattctcagaaactactttgtgatgattgcattcaagtcacagagttgaacattccctttgacagagcagtttggaaactctctttgtgtagaatctgcaagtggagatatggaccgctttgaggcctatggtagtaaaggaaatagcttcatataaaagctagacagtagcattctcagaaacttctttgtgatgcttgcattcaactcacagagttgaactttcctttcgagagagaagctttgaaacactctttttccagaatgtgcaagtggacatttggggagctttgaggcctgtggaggaaaaggaattatcttcccgtaaaagctagatagaagcattgtcagaaacttctttgtgatgattgcattcaactcacagagttgaaggttccttttcaaacagcagtttccaatcactctttctgtggaatctgcaagtggatatttgggcctctctgaggatttcgttggaaacgggataaaacgcacagaactgaaacagaagcattctcagaaacttctctgtgatgtttgtgttcaactcccagagtttcacgttgcttttcatagagtagttctgaaacatgcttttcgtagtgtctgcaagtggacatttggagcgctttcaggcctgtggtggaaaacgaattatggtcacataaaaactggagagaagccttctcagaaacttctctgtgatgattgcattcaactcacagagttgaaccctcctatggatagagcagtgttgaaactctctttttgtggaatctgcaagtggatatgtggacctctccgaagatgtctttggaaacgggaatatcttcacataaaaactaaacagaagcattctcagaaacttcttggtgatgtttgcattcaaatcccagagttgaaccttcctttgatagttcaggtttgaaacactctttctgtaggatctgcaagtggctatttggaccactctgtggccttcgttcgaaacgggtatatcttcgcataaaatctagacagaagcattctcagaaaatactttgtgatgattgagttgaactcacagagctgaacattcctttggatggagcaggtttgagacacactttttgtagaatctacaagtggatatttggacctctctgaggatttcgttggaaacgggataactgcacctaactaaacggaagcattctcagaaactgctttgtgatgattgcattcacctcacagagttgaacattcctattgatagagcagtttggaaacactcttgttgtggaatgtgcaagtggagatttggagcgctttgaggcctatggtagtaaagggaatagcttcatagaaaaactagacagatgcattctcaggaactttttggtgatgtttgtattcaactcccagagttgaactttcctttggaaagagcagctatgaaacactgtttctctagaatctgcaagtggacgtttggagggctttgtggtttgtggtggaaaaggaaatatcttcacctaaatactagatagaagcatcctcagaagcttctctgtgatgactgcattcaactcacggagttgaacactccttttgagagcgcagttttgaaactctctttctgtggcatctgcaaggggacatgtagacctctttgaagatttcgttggaaacggaatcatcttcacataaaaactacacagaagcagtctcagaatcttctttgtgatgtttgcattcaaatcccagagttgaactttcctttcaaagttcacgtttgaaacactctttttgcaggatctacaagtggatatttggaccactctgtgtccttcgttcgaaacgggtatatcttcacatgacatctagacagaagctttctcagaaaattctttgggatgattgagtggaactcacagagctgaacattccttgcgatggagcagtttagaaacacactttctgcagaatctgcaagtgcatatttggacctctctgaggaattcgttggaaacgggataatttcagctgactaaacagaagcattctcagaaccttcttcgtgatgtctgcattcaactcacagtgtggaacctttctttgatagttcaggtttgaaacactctttttgtagaaactgcaaggggataattgcacttctttgaggcctaccgtagtaaaggaaataacttcctatagaaagaagacagaagcattctcagaaccctcttcgtgatgtttgcattcaactcacaagtgctgaacctttctttgatagttcagctttgaaacactcttcttgtagaaactgcaagtggatatttggtcctctctgaggatttcgttggaaacgggataaaccgcacagaactaaacagaagaattctcagagccctcttcgtgatgtttgcattcaactcacagtgctgaacctttctttgatagtgcagctttgaaacactctttttgtagaaactgcaagtggatgtttggtcctctctgaggatttcgttggaaacgggataaaccgcacagaactaaaacagaaaagcattgtcagaaacttctttgtgatgattgcattcaactcacagagttgaaggttccttttcaaacagcagtttccaatcactctttctgtggaatctgcaagtggatatttgggcctctctgaggatttcgttggaaacgggataaaacgcacagaactaaaacagaagcattctcagaaacttctctgtgatgtttgtgttcaactcccagagtttcacgttgcttttcatagagtagttctgaaacatgcttttcgtagtgtctgcaagtggacatttggagcgctttcaggcctgtggtggaaaacgaattatggtcacataaaaactggagagaagccttctcagaaacttctctgtgatgattgcattcaactcacagagttgaaccctcctatggatagagcagtgttgaaactctctttttgtggaatctgcaagtggatatgtggacctctccgaagatgtctttggaaacgggaatatcttcacataaaaactaaacagaagcattctcagaaacttcttcgtgatgtttgcattcaaatcccagatttgaaccttcctttgagagttcaggtttgaaacactctttttgtaggatctgcaagtggatatttggaccactctgtggccttcgttcgaaacgggtacatcttcgcataaaatctagacagaagcattctcagaaaatactttgtgatgattgagtttaactcacagcagctgaacattcctttggatggagcaggtttgagacacactttttgtagaatctacaagtggatatttggacctctctgaggatttcgttggaaacgggataactgcacctaactaaacggaagcattctcagaaactgctttgtgatgattgcattcacctcacagagttgaacattcctattgatagagcagtttggaaacactcttgttgtggaatgtgcaagtggagatttggagcgctttgaggcctatggtagtaaagggaatagcttcatagaaaaactagacagatgcattctcaggaactttttggtgatgtttgtattcaactcccagagttgaactttccctttggaaagagcagctatgaaacactctttttctagaatctgcaagtggacgtttggagggctttgtggtttgtggtggaaaaggaaatatcttcacctaaatactagatagaagcattctcagaagcttctctgtgatgactgcattcaactcacggagttgaacactccttttgagagcgcagttttgaaactctctttctgtggcatctgcaaggggacatgtagacctctttgaagatttcgttggaaacggaatcatcttcacataaaaactatacagaaagcagtctcagaatcttctttgtgatgtttgcattcaaatcccagagttgaactttcctttcaaagttcacgtttgaaacactctttttgcaggatctacaagtggatatttggaccactctgtgtccttcgttcgaaacgggtatatcttcacacgacatctagacagagctttctcagaaaattctttgggatgattgagttgaactcacagagctgaacattccttgcgatgtagcagtttagaaacacactttctgcagaatctgcaagtgcatatttggacctctctgaggaattcgttggaaacgggataatttcagctgactaaacagaagcattctcagaaccttcttcgtgatgtctgcattcaactcacagtgtggaacctttctttgatagttcaggtttgaaacactctttttgtagaaactgcaaggggataattgcacttctttgaggcctaccgtagtaaaggaaataacttccctatagaaagaagacagaagaattctcagagccctcttcgtgatgtttgcattcaactcacagtgctgaacctttctttgatagtgcagctttgaaacactctttttgtagaaactgcaagtggatgtttggtcctctctgaggatttcgttggaaacgggataaaccgcacagaactaaaacagaagcattgtcagaaacttctttgtgatgattgcattcaactcacagagttgaaggttccttttcaaacagcagtttccaatcactctttctgtggaatctgcaagtggatatttgggcctctctgaggatttcgttggaaacgggataaaacgcacagaactaaaacagaagcattctcagaaacttctctgtgatgtttgtgttcaactcccagagtttcacgttgcttttcatagagtagttctgaaacatgcttttcgtagtgtctgcaagtggacatttggagcgctttcaggcctgtggtggaaaacgaattatggtcacataaaaactggagagaagccttctcagaaacttctctgtgatgattgcattcaactcacagagttgaaccctcctatggatagagcagtgttgaaactctctttttgtggaatctgcaagtggatatgtggacctctccgaagatgtctttggaaacgggaatatcttcacataaaaactaaacagaagcattctcagaaacttcttggtgatgtttgcattcaaatcccagagttgaaccttcctttgatagttcaggtttgaaacactctttttgtaggatctgcaagtggctatttggaccactctgtggccttcgttcgaaacgggtatatcttcgcataaaatctagacagaagcattctcagaaaatactttgtgatgattgagtttaaatcacagagctgaccattcctttcgatggagcaggtttgagacacactttttgtagaatctacaagtggatatttggacctctctgaggatttcgttggaaacgggataactgcacttaactaaacggaagcattctcagaaactgctttgtgatgattgcattcacctcacagagttgaacattcctattgatagagcagtttggaaacactcttgttgtggaatgtgcaagtggagatttggagcgctttgaggcctatggtagtaaagggaatagcttcatagaaaaactagacagatgcattctcaggaactttttggtgatgtttgtattcaactcccagagttgaactttcctttggaaagagcagctatgaaacactctttttctagaatctgcaagtggacgtttggagggctttgtggtttgtggtggaaaaggaaatatcttcacctaaatactagatagaagcattctcagaagcttctctgtgatgactgcattcaactcagggagttgaacactccttttgagagcgcagttttgaaactctctttctgtggcatctgcaaggggacatgtagacctctttgaagatttcgttggaaacggaatcttcttcacataaaaaatatacagaagcagtctcagaatcttctttttgatgtttgcattcaaatcccagagttgaactttcctttcaaagttcacgtttgaaacactctttttgcaggatctacaagtggatatttggaccactctgtgtccttcgttcgaaacgggtatatcttcacatgacatctagacagaagctttctcagaaaattctttgggatgattgagtggaactcacagagctgaacattccttgcgatgtagcagtttagaaacacactttctgcagaatctgcaagtgcatatttggacctctctgaggaattcgttggaaacgggataattacagctgactaaacagaagcattctcagaaccttcttcgtgatgtctgcattcaactcacagtgtggaacctttctttgatagttcaggtttgaaacactctttttgtagaaactgcaaggggataattgcacttctttgaggcctaccgtagtaaaggaaataacttcctatagaaagaagacagaagcattctcagaaccctcttcgtgatgtttgcattcaactcacagtgctgaacctttctttgatagttcagctttgaaacactctttttgtagaaactgcaagtggatatttggtcttctctgaggatttcgttggaaagaggataaaccgcacagaactaaacagaagcattctcagaaccttcttcgtgatgtttgcattcaactcacagtgttgaacctttctttgatagttcaggttggaaacggtctttctgtagaaactgcaagtagatatttggacctctctgaggatttcgttggaaacgggataaaccgcacagaactaaaacagaagcattcacagaaaactcttggtgacgactgagtttaactcacagagctgaacattcctttggatggagcagtttcgaaacacactatttgtagaatgtgcaagtggatatttgggcctctctgaggatttcgttggaaacgggataaaccgcacagaactaaacagaagcattctcagaaactactttgtgatgattgcattcaagtcacagagttgaacattccctttgacagagcagtttggaaactctctttgtgtagaatctgcaagtggagatatggaccgctttgaggcctatggtagtaaaggaaatagcttcatataaaagctagacagtagcattctcagaaacttctttgtgatgcttgcattcaactcacagagttgaactttcctttcgagagagaagctttgaaacactcttttccagaatctgcaagtggacatttggagggctttgaggcctgtggtggaaaaggaattatcttcccgtaaaagctagacagaagcattgtcagaaacttctttgtgatgattgcattcaactcacagagatgaaggttcctttacaaacagcagtttccaaacactctttctgtggaatctgcaagtggatatttggacctctttgaagatttcgttggaaacgggagaatcttcacagaaaagctaaacagaagcattctcagaaacttctctgtgatgtttgtgttcaactcccagagtttcacattgcttttcatagagaagttctgaaacatgcttttcgtagtgtctacaagtggacatttggagcgctttcaggcctgtggtggaaaacgaattatggtcccataaaaactggagagaagccttctcagaaacttctctgtgatgattgcattcaactcacagagttgaaccctcctatggatagagcagtgttgaaactctctttttgtggaacctgcaagtggatatgtggacctctccgaagatgtctttggaaacgggaatatcttcacataaaaactaaacagaagcattctcagaaacttcttggtgatgtttgcattcaaatcccagagtcgaaccttcctttgatagttcaggtttgaaacactctttttgtaggatctgcaagtggatatttggaccactctgtggccttcgttcgaaacgggtatatcttcgcataaaatctagacagaagcattctcagaaaatactttgtgatgattgagttaaaatcacagagctgaacattcctttggatggagcaggtttgagacacactttttgtagaatctacaagtggatatttggacctctctgaggatttcgttggaaacgggataactgcacctaactaaacggaagcattctcagaaactgctttgtgatgattgcattcacctcacagagttgaacattcctattgatagagcagtttggaaacactcttgttgtggaatgtgcaagtggagatttggagcgctttgaggcctatggtagtaaagggaatagcttcatagaaaaactagacagaatgcattctcaggaactttttggtgatgtttgtattcaactcccagagttgaactttcctttggaaagagcagctatgaaacactctttttctagaatctgcaagtggacgtttggagggctttgtggtttgtggtggaaaaggaaatatcttcacctaaatactagatagaagcattctcagaagcttctctgtgatgactgcattcaactcacggagttgaacactccttttgagagcgcagttttgaaactctctttctgtggcatctgcaaggggacatgtagacctctttgaagatttcgttggaaacggaatcatcttcacataaaaactatacagaagcagtctcagaatcttctttgtgatgtttgcattcaaatcccagagttgaactttcctttcaaagttcacgtttgaaacactctttttgcaggatctacaagtggatatttggaccaatctgtgtccttcgttcgaaacgggtatatcttcacatgacatctagacagaagctttctcagaaaattgtttgggatgattgagttgaactcacagagctgagcattccttgcgatgtagcagtttagaaacacactttctgcagaatctgcaagtgcatatttggacctctctgaggaattcgttggaaacgggataatttcagctgactaaacagaagcattctcagaaccttcttcgtgatgtctgcattcaactcacagtgtggaacctttctttgatagttcaggtttgaaacactctttttgtagaaactgcaaggggataattgcacttctttgaggcctaccgtagtaaaggaaataacttcctatagaaagaagacagaagcattctcagaaccctcttcgtgatgtttgcattcaactcacagcgctgaaactttctttgatagttcagctttgaaacactcttcttgtagaaactgcaagtggatatttggtcctctctgaggatttcgttggaaacgggataaaccgcacagaactaaacagaagcattctcagaaccttcttcgtgatgtttgcattcaactcacagtgttgaacctttctttgatagttcaggtttgaaacggtctttctgtagaaactgcaagaagatatttggacctctctgaggatttcgttggaaacgggataaaccgcacagaactaaaacagaagcattcacagaaaactcttggtgacgactgagtttaactcacagagctgaacattcctttggatggagcagtttcgaaacacactatttgtagaatctgcaagtggatatttgggcctctctgaggatttcgttggaaacgggataaaccgcacagaactaaaacagaagcattctcagaaactactttgtgatgattgcattcaagtcacagagttgaacattccctttgacagagcagtttggaaactctctttgtgtagaatctgcaagtggagatatggaccgctttgaggcctatggtagtaaaggaaatagcttcatataaaagctagacagtagcattctcagaaacttctttgtgatgcttgcattcaactcacagagttgaactttcctttggagagagaagctttgaaacactctttttccagaatctgcaagtggacatttggagggctttgaggcctgtggtggaaaaggaattatcttcccgtaaaagctagatagaagcattgtcagaaacttctttgtgatgattgcattcaactcacagagttgaaggttccttttcaaacagcagtttccaatcactctttctgtggaatctgcaagtggatatttggacctctttgaagatttcgttggaaacgggagaatcttcacagaaaagctaaacagaagcattctcagaaacttctctgtgatgtttgtgttcaactcccagagtttcacattgcttttcatagagtagttctgaaacatgcttttcgtagtgtctgcaagtggacatttggagcgctttcaggcctgtggtggaaaacgaattatggtcccataaaaactggagagaagccttctcagaaccttctctgtgatgattgcattcaactcacagacttgaaccctcctatggatagagcagtgttgaaactctctttttgtggaatctgcaagtggatatgtggacctctccgaagatgtctttggaaacgggaatatcttcacataaaaactaaacagaagcattctcagaaacttcttggtgatgtttgcattcaaatcccagagttgaaccttcctgtgatagttcaggtttgaaacactctttttgtaggatctgcaagtggatatttggaccactctgtggccttcgttcgaaacgggtacatcttcacataaaatctagacagaagcattctcagaaaatactttgtgatgattgagtttaaatcacagagctgaacattcctttggatggagcaggtttgagacacactttttgtagaatctacaagtggatatttggacctctctgaggatttcgttggaaacgggataactgcacctaactaaacggaagcattctcagaaactgctttgtgatgattgcattcacctcacagagttgaacattcctattgatagagcagtttggaaacactcttgttgtggaatgtgcaagtggagatttggagcgctttgaggcctatggtagtaaagggaatagcttcatagaaaaactagacagatgcattctcaggaactttttggtgatgtttgtattcaactcccaagagttgaactttcctttggaaagagcagctatgaaacactctttttctagaatctgcaagtggacgtttggagggctttgtggtttgtggtggaaaaggaaatatcttcacctaaatactagatagaagcattctcagaagcttctctgtgatgactgcattcaactcacggagttgaacactccttttgagagcgcagttttgaaactctctttctgtggcatctgcaaggggacatgtagacctctttgaagatttcgttggaaacggaatcatcttcacataaaaactatacagaagcagtctcagaatcttctttgtgatgtttgcattcaaatcccagcagttgaactttcctttcaaagttcacgtttgaaacactctttttgcaggatctacaagtggatatttggaccactctgtgtccttcgttcgaaacgggtatatcttcacacgacatctagacagaagctttctcagaaaattctttgggatgattgagttgaactcacagagctgaacattccttgcgatggagcagtttagaaacacactttctgcagaatctgcaagtgcatatttggacctctctgaggaattcgttggaaacgggataatttcagctgactaaacagaagcattctcagaaccttcttcgtgatgtctgcattcaactcacagtgtggaacctttatttgatagttcaggtttgaaacactctttttgtagaaactgcaaggggataattgcacttctttgaggcctaccatagtaaaggatataacttcctataaaaagaagacagaagcattctcagaaccttcttcgtgatgtttgcattcaactcacactgctgaacctttctttgatagttcagctttgaaacactctttttgtagaaactgcaagtggatatttggtcctctctgaggatttcgttggaaacgggataaaccgcacagaactaaacagaagcattctcagaaccatcttcgtgatgtttgcattcaacccacagtgctgaaactttctttgatagttcagctttgaaactctctttttgtagaaactgcaagtggatatttgggcctctctgaggatttcgttggaaacgggataaaccgcacagaactaaacagatagcattcacagtaaaactcttggtgacgactgagtttaactcacagagctgaacattcctttggatggagcagtttcgaaacacactatttgtagaatgtgcaagtggatatttgggcctctctgaggatttcgttggaaacgggataaaccgcacagaactaaacagaagcattctcagaaactactttctgattattgcattcaagtcacagagttgaacattccctttgacagagcagtttggaaactctctttgtgtagaatctgcaagtggagatatggaccgctttgaggcctatggtagtaaaggaaatagcttcatataaaagctagacagtagcattctcagaaacttctttgtgatgcttgcattcaactcacagagttgaactttcctttcgagagagaagctttgaaacactctttttccagaatgtgcaagtggacatttggggagctttgaggcctgtggtggaaaaggaattatcttcccgtaaaagctagatagaagcattgtcagaaacttctttgtgatgattgcattcaactcacagagttgaaggttccttttcaaagagcagtttccaatcactctttctgtggaatctgcaagtggatatttggacctattttgaagatttcgttggaaacgggagaatcttcacaggaaagctaaacagaagcattctcagaaacttctctgtgatgtttgtgttcaactcccagagtttcacattgcttttcatagagtagttctgaaacatgcttttcgtagtgtctacaagtggacatttggagcgctttcaggcctgtggtggaaaacgaattatggtcacataaaaactggagagaagccttctcagaaacttctctgtgatgattgcattcaactcacagagttgaaccctcctatggatagagcagtgttgaaactctctttttgtggaatctgcaagtggatatgtggacctctccgaagatgtctttggaaacgggaatatcttcacataaaaacttaacagaagcattctcagaaacttcttggtgatgtttgcattcaaatcccagagttgaaccttcctttgatagttcaggtttgaaacactctttctgtaggatctgcaagtggctatttggaccactctgtggccttcgttcgaaacgggtatatcttcgcataaaatctagacagaagcattctcagaaaatactttgtgatgattgagtttaaatcacagagctgaccattcctttggatggagcaggtttgagacacactttttgtagaatctacaagtggatatttggacctctctgaggatttcgttggaaacgggataactgcacctaactaaacggaagcattctcagaaactgctttgtgatgattgcattcacctcacagagttgaacattcctattgatagagcagtttggaaacactcttgttgtggaatgtgcaagtggagatttggagcgctttgaggcctatggtagtaaagggaatagcttcatagaaaaactagacagatgcattctcaggaactttttggtgatgtttgtattcaactcccagagttgaactttcctttggaaagagcagctatgaaacactctttttctagaatctgcaagtggacgtttggagggctttgtggtttgtggtggaaaaggaaatatcttcacctaaatactagacagaagcattctcagaagcttctctgtgatgactgcattcaactcacggagttgaacactccttttgagagcgcagttttgaaactctctttctgtggcatctgcaaggggacatgtagacctctttgaagatttctttggaaacggaatcatcttcacataaaaactatacagaagcagtctcagaatcttctttgtgatgtttgcattcaaatcccagagttgaactttcctttcaaagttcacgtttgaaacactctttttgcaggatctacaagtggatatttggaccactctgtgtccttcgttcgaaacgggtataacttcacacgacatctagacagaagctttctcagaaaattctttgggatgattgagtggaactcacagagctgaacattccttgcgatggagcagtttagaaacacactttctgcagaatctgcaagtgcatatttggacctctctgaggaattcgttggaaacgggataatttcagctgactaaacagaagcattctcagaaccttcttcgtgatgtctgcattcaactcacagtgtggaacctttctttgatagttcaggtttgaaacactctttttgtagaaactgcaaggggataattgcacttctttgaggcctaccgtagtaaaggaaataacttcctatagaaagaagacagaagcattctgagaaccctcttcgtgatgtttgcattcaactcacagtgctgaacctttctttgatagttcagctttgaaacactcttcttgtagaatctgcaagtcgatatttggtcctctctgaggatttcgttggaaacgggataaaccgcacagaactaaacagaagcatcctcagaaccttcttcgtgatgtttgcattcaactcacaagtgctgaacctttctttgatagttcagctttgaaacactctttttgtagaaactgcaagtggatatttggacctctctgaggatttcgttggaaacgggataaaccgcacagaactaaaacagaagcattctcagaaccttcttcgtgatgtttgcattcaactcacagtgttgaacctttctttgatagttcaggtttgaaacggtctttctgtagaaactgcaagtagatatttggacctctctgaggatttcgttggaaacgggataacccgcacagaactaaaacagaagcattcacagaaaactcttggtgacgactgagtttaactcacagagctgaacattcctttggatggagcagtttcgaaacacactatttgtagaatgtgcaagtggatatttaggcctctctgaggatttcgttggaaacgggataaaccgcacagaactaaacagaagcattctcagaaactactttgtgatgattgcattcaagtcacagagttgaacattccctttgacagagcagtttggaaactctctttgtgtagaatctgcaagtggagatatggaccgctttgaggcctatggtagtaaaggaaatagcttcatataaaagctagacagtagcattctcagaaacttctttgtgatgcttgcattcaactcacagagttgaactttcctttcgagagagaagctttgaaacactctttttccagaatgtgcaagtggacatttggggagctttgaggcctgtggtggaaaaggaattatcttcccataaaagctagatagaagcattgtcagaaacttctttgtgatgattgcattcaactcacagagttgaaggttccttttcaaacagcagtttccaatcactctttctgtggaatctgcaagtggatatttcgacctctttgaagatttcgttggaaacgggagaatcttcacagaaaagctaaacagaagcattctcagaaacttctctgtgatgtttgtgttcaactcccagagtttcacattgcttttcatagagtagttctgaaacatgcttttcgtagtgtctgcaagtggacatttggagcgctttcaggcctgtggtggaaaacgaattatggtcacataaaaactggagagaagccttctcagaaacttctctgtgatgattgcattcaactcacagagttgaaccctcctatggatagagcagtgttgaaactctctttttgtggaatctgcaagtggatatgtggacctctccgaagatgtctttggaaacgggaatatcttcacataaaaactaaacagaagcattctcagaaacttcttggtgatgtttgcattcaaatcccagagttgaacattcctttgatagttcaggtttgaaacactctttttgtaggatctgcaagtggatatttggaccactctgtggccttcgttcgaaacgggtatatcttcgcataaaatccagacagaagcattctcagaaaatactttgtgatgattgagtttaactcacagagctgaacattcctttggatggagcaggtttgagacacacatttgtagaatctacaagtggatatttggacctctctgaggatttcgttggaaacgcgataactgcacctaactaaacggaagcattctcagaaactgctttgtgatgattgcattcacctcacagagttgaacattcctattgatagagcagtttggaaaccctcttgttgtggaatgtgcaagtggagatttggagcgctttgaggcctatggtagtaaagggaatagcttcatagaaaaactagacagatgcattctcaggaactttttggtgatgtttgtattcaactcccagagttgaactttcctttggaaagagcagctatgaaacactctttttctagaatctgcaagtggacgtttggagggctttgtggtttgtggtggaaaaggaaatatcttcacctaaatactagatagaagcattctcagaagcttctctgtgatgactgcattcaactcacggagttgaacactccttttgagagcgcagttttgaaactctctttctgtggcatctgcaaggggacatgtagacctctttgaagatttcgttggaaacggaatcatcttcacataaaaactatacagaagcagtctcagaatcttctttgtgatgtttgcattcaaatcccagagttgaactttcctttcaaagttcacgtttgaaacactctttttgcaggatctacaagtggatatttggaccactctgtgtccttcgttcgaaacgggtatatcttcacacgacatctagacagaagctttctcagcaaaattctttgggatgattgagtggaactcacagagctgaacattccttgcgatggagcagtttagaaacacactttctgcagaatctgcaagtgcatatttggacctctctgaggaattcgttggaaacgggataatttcagctgactaaacagaggcattctcagaaccttcttcgtgatgtctgcattcaactcacagtgtggaacctttctttgatagttcaggtttgaaacactctttttgtagtaactgcaagaggataattgcacttctttgaggcctaccgtagtaaaggaaataacttcctataaaaagaagacagaagcattctcagaaccctcttcgtgatgtttgcattcaactcacggtgctgaacctttctttgatagttcagctttgaaacactctttttgtagaaactgcaagtggatatttggtcctctctgaggatttcgttggaaacgggacaaaccgcacagaactaaacagaagcattctcagaaccttcttcgtgatgtttgcattcaactcacagtgttgaacctttctttgatagttcaggtttgaaacggtctttctgtagaaactgcaagtagatatttggagctctctgaggatttcgttggaaacgggataaaccgcacagaactaaaacagaagcattcacagaaaactcttggagacgactgagtttaactcacagagctgaacattcctttggatggagcagtttcgaaacacactatttgtagaatgtgcaagtggatatgtgggcctctctgaggatttcgttggaaacgggataaaccgcacagaactaaacagaagcattctcagaaactactttgtgatgattgcattcaagtcacagagctgaacattccctttgacagagcagtttggaaactctctttgtgtagaatctgcaagtggagatatggaatgctttgaggactatggtagtaaacgaaatagcttcatagacaagctagacagtagcattctcagaaacttctttgtgatgcttgcattcaactcacagagttgaactttcctttcgagagagaagctttgaaacactctttttccagaatctgcaagtggacatttggagggctttgaggcctgtggtggaaaaggaattaacttcccgtaaaagctagatagaagtattgtcagaaacttctttgtgatgattgcattcaactcacagagttgaaggttccttttcaaacagcagtttccaatcactctttctgtggaatctgcaagtggatatttggacctattttgaagatttcgttggaaacgggataatcttcacagaaaagctaaacagaagcattctcagaaacttctctgtgatgtttgtgttcaactcccagagtttcacattgcttttcatagagtagttctgaaacatgcttttcgtagtgtctacaagtggacatttggagcgctttcaggcctgtggtggaaaacgaattatggtcacataaaaactggagagaagccttctcagaaacttctctgtgatgattgcattcaactcacagagttgaaccctcctatggatagagcagtgttgaaactctctttttgtggaatctgcaagtggatatgtggacctctccgaagatgtctttggaaacgggaatatcttcacataaaaactaaacagaagcattctcagaaacttcttggtgatgtttgcattcaaatcccagagttgaaccttcctttgatagttcaggtttgaaacactctttttgtaggatctccaagtggatatttggaccactctgtggccttcgttcgaaacgggtatatcttcgcataaaatctagacagaagcattctcagaaaatactttgtgatgattgagtttaactcacagagctgaacattcctttggatggagcaggtttgagacacactttttgtagaatctacaagtggatatttggacctctctgaggatttcgttggaaacgcgataactgcacctaactaaacggaagcattctcagaaactactttgtgatgattgcattcacctcacagagttgaacattcctattgatagagcagtttggaaacactcttgttgtggaatgtgcaagtggagatttggagcgctttgaggcctatggtagtaaagggaatagcttcatagaaaaactagacagatgcattctcaggaactttttggtgatgtttgtattcaactcccagagttgaactttcctttggaaagagcagctatgaaacactctttttctagaatctgcaagtggacgtttggagggctttgtggtttgtggtggaaaaggaaatatcttcacctaaatactagatagaagcattctcagaagcttctctgtgatgactgcattcaactcacggagttgaacactccttttgagagcgcagttttgaaactctctttctgtggcatctgcaaggggacatgttgacctctttgaagatttcgttggaaacggaatcatcttcgcataaaaactatacagaagcagtctcagaatcttctttgtggtgtttgcattcaaatcccagagttgaactttcctttcaaagttcacgtttgaaacactctttttgcaggatctacaagtggatatttggaccactctgtgtccttcgttcgaaacgggtatatcttcacatgacatctagacagaagttttctcagaaaattctttgggatgattgagtggaactcacagagctgaacattccttgcgatgtagcagtttagaaacacactttctgcagaatctgcaagtgcatatttggacctctctgaggaattcgttggaaacgggataatttcagctgactaaacagaagcattctcagaaccttcttcgtgatgtctgcattcaactcacagtgtggaacctttctttgatagttcaggtttgaaacactctttttgtagaaactgcaaggggataattgcacttctttgaggcctaccgtagtaaaggaaataacttcctatagaaagaagacagaagcattctcagaaccctcttcgtgatgtttgcattcaactcacagtgctgaacctttctttgatagttcagctttgaaacactcttcttgtagaaactgcaagtggatatttggtcctctctgaggatttcgttggaaacgggataaaccgcacagaactaaacagaagcattctcagagccctcttcgtgatgtttgcattcaactcacagtgctgaacctttctttgatagtgcagctttgaaacactctttttgtagaaactgcaagtggatgtttggtcctctctgaggatttcgttggaaacgggataaaccgcacagaactaaaacagaagcattgtcagaaacttctttgtgatgattgcattcaactcacagagttgaaggttccttttcaaacagcagtttccaatcactctttctgtggaatctgcaagtggatatttgggcctctctgaggatttcgttggaaacgggataaaacgcacagaactaaaacagaagcattctcagaaacttctctgtgatgtttgtgttcaactcccagagtttcacgttgcttttcatagagtagttctgaaacatgcttttcgtagtgtctgcaagtggacatttggagcgctttcaggcctgtggtggaaaacgaattatggtcacataaaaactggagagagccttctcagaaacttctctgtgatgattgcattcaactcacagagttgaaccctcctatggatagagcagtgttgaaactctctttttgtggaatctgcaagtggatatgtggacctctccgaagatgtctttggaaacgggaatatcttcacataaaaactaaacagaagcattctcagaaacttcttggtgatgtttgcattcaaatcccagagtcgaaccttcctttgatagttcaggtttgaaacactctttttgtaggatctgcaagtggatatttggaccactctgtggccttcgttcgaaacgggtatatcttcgcataaaatctagacagaagcattctcagaaaatactttgtgatgattgagtttaactcacagagctgaacattcctttggatggagcaggtttgagacacactttttgtagaatctacaagtggatatttggacctctctgaggatttcgttggaaacgggataactgcacctaactaaacggaagcattctcagaaactgctttgtgatgattgcattcacctcaccagagttgaacattcctattgatagagcagtttggaaacactcttgttgtggaatgtgcaagtggagatttggagcgctttgaggcctatggtagtaaagggaatagcttcatagaaaaactagacagatgcattctcaggaactttttggtgatgtttgtattcaactcccagagttgaactttcctttggaaagagcagctatgaaacactctttttctagaatctgcaagtggacgtttggagggctttgtggtttgtggtggaaaaggaaatatcttcacctaaatactagatagaagcattctcagaagcttctctgtgatgactgcattcaactcacggagttgaacactccttttgagagcgcagttttgaaactctctttctgtggcatctgcaaggggacatgtagacctctttgaagatttcgctggaaacggaatcatcttcacataaaaactatacagaagcagtctcagaatcttctttgtgatgtttgcattcaaatcccagagttgaactttcctttcaaagttcacgtttgaaacactctttttgcaggatctacaagtggatatttggaccactctgtgtccttcgttcgaaacgggtatatcttcacacgacatctagacagaaagctttctcagaaaattctttgggatgattgagtggaactcacagagctgaacattccttgcgatgtagcagtttagaaacacactttctgcagaatctgcaagtgcatatttggacctctctgaggaattcgttggaaacgggataatttcagctgactaaacagaagcattctcagaaccttcttcgtgatgtctgcattcaactcacagtgtggaacctttctttgatagttcaggtttgaaacactctttttgtagaaactgcaaggggataattgcacttctttgaggcctaccgtagtaaaggaaataacttcctatagaaagaagacagaagcattctcagaaccctcttcctgatgtttgcattcaactcacagtgctgaacctttctttgatagttcagctttgaaacactcttcttgtagaaactgcaagtggatatttggtcctctctgaggatttcgttggaaacgggataaaccgcacagaactaaacagaagaactctcagagccctcttcgtgatgtttgcattcaactcacagtgctgaacctttctttgatagtgcagctttgaaacactctttttgtagaaactgcaagtggatatttggtcctctctgaggatttcgttggaaacgggataaaccacacagaactaaaacagaagcattctcagaaccttcttcgtgatgtttgcattcaactcacagtgttgaacctttctttgatagttcaggtttgaaacggtctttctgtagaaactgcaagtagatatttggacctctctgaggatttcgttggaaacgggataacccgcacagaactaaaacagaagcattcacagaaaactcttggtgacgactgagtttaactcacagagctgaacattcctttggatggagcagtttcgaaacacactatttgtagaatgtgcaagtggatatttgggcctctctgaggatttcgttggaaacgggataaaccgcacagaactaaacagaagcattctcagaaactactttgtgatgattgcattcaagtcacagagttgaacattccctttgacagagcagtttggaaactctctttgtgtagaatctgcaagtggagatatggaccgctttgaggcctatggtagtaaaggaaatagcttcatataaaagctagacagtagcattctcagaaacttctttgtgatgcttccattcaactcacagagttgaactttcctttcgagagagaagctttgaaacactctttttccagaatctgcaagtggacatttggagggctttgaggcctgtggtggaaaaggaattatcttcccgtaaaagctagatggaagcattgtcagaaacttctttgtgatgattgcattcaactcacagagttgaaggttccttttcaaacagcagtttccaatcactctttctgtggaatctgcaagtggatatttggacctagtttgaagatttcgttggaaacgggagaatcttcacagaaaagctaaacagaagcattctcagaaacttctctgtgatgtttgtgttcaactcccagagtttcacgttgcttttcatagagtagttctgaaacatgcttttcgtagtgtctgcaagtggacatttggagcgctttcaggcctgtggtggaaaacgaattatggtcacataaaaactggagagaagccttctcagaaacttctctgtgatgattgcattcaactcacagagttgaaccctcctatggatagagcagtgttgaaactctctttttgtggaatctgcaagtggatatgtggacctctccgaagatgtctttggaaacgggaatatcttcacataaaaactaaacagaagcattctcagaaacttcttggtgatgtttgcattcaaatcccagagttgaaccttcctttgatagttcaggtttgaaacactctttctgtaggatctgcaagtggctatttggaccactctgtggccttcgttcgaaacgggtatatcttcgcataaaatctagacagaagcattctcagaaaatactttgtgatgattgagttgaactcacagagctgaacattcctttggatggagcaggtttgagacacactttttgtagaatctacaagtggatatttggacctctctgaggatttcgttggaaacgggataactgcacctaactaaacggaagccttctcagaaactgctttgtgatgattgcattcacctcacagagttgaacattcctattgatagagcagtttggaaacactcttgttgtggaatgtgcaagtggagatttggagcgctttgaggcctatggtagtaaagggaagagcttcatagaaaaacaagacagatgcattctcaggaactttttggtgatgtttgtattcaactcccagagttgaactttcctttggaaagagcagctatgaaacactctttttctagaatctgcaagtggacgtttggagggctttgtggtttgtggtggaaaaggaaatatcttcacctaaatactagatagaagcattctcagaagcttctctgtgatgactgcattcaactcacggagttgaacactccttttgagagcgcagttttgaaactctctttctgtggcatctgcaaggggacatgtagacctctttgaagatttcgctggaaacggaatcatcttcacataaaaactatacagaaagcagtctcagaatcttctttgtgatgtttgcattcaaatcccagagttgaactttcctttcaaagttcacgtttgaaacactctttttgcaggatctacaagtggatatttggaccactctgtgtccttcgttcgaaacgggtataacttcacacgacatctagacagaagctttctcagaaaattctttgggatgattgagtggaactcacagagctgaacattccttgcgatgtagcagtttagaaacacactttctgcagaatctgcaagtgcatatttggacctctctgaggaattcgttggaaacgggataatttcagctgactaaacagaagcattctcagaacttcttcgtgatgtctgcattcaactcacagtgtggaacctttctttgatagttcaggtttgaaacactctttttgtagaaactgcaaggggataattgcacttctttgaggcctaccgtagtaaaggaaataacttcctatagaaagaagacagaagcattctcagaaccctcttcgtgatgtttgcattcaactcacagtgctgaacctttctttgatagttcagctttgaaacactcttcttgtagaaactgcaagtggatatttggtcctctctgaggatttcgttggaaacgggataaaccgcacagaactaaacagaagcattctcagaaccttcttcgtgatgtttgcattcaactcacagtgttgaacctttctttgatagttcaggtttgaaacgatctttctgtagaaactgcaagtagatatttggacctctctgaggatttcgttggaaacgggataaaccgcacagaactaaaacagaagcattcacagaaaactcttggtgacgactgagtttaactcacagagctgaacattcctttggatggagcagtttcgaaacacactatttgtagaatctgcaagtggatatgtgggcctctctgaggatttcgttggaaacgggtaaatcgcacagaactaaacagaagcattctcagaaactactttgtgattattgcattcaagtcacagagttgaacattccctttgacagagcagtttggaaactctctttgtgtagaatctgcaagtggagatatggaccgctttgaggcctatggtagtaaaggaaatagcttcatataaaacctagacagtagcattctcagaaacttctttgtgatgcttgcattcaactcacagagttgaactttcctttcgagagagaagctttgaaacactctttttccagaatgtgcaagtggacatttggggagctttgaggcctgtggtggaaaaggaattatcttcccgtaaaagctagatagaagcattgtcagaaacttctttgtgatgattgcattcaactcacagagatgaaggttcctttacaaacagcagtttccaaacactctttctgtggaatctgcaagtggatatttagacctctttgaagatttcgttggaaacgggagaatcttcacagaaaagctaaacagaagcattctcagaaacttctctgtgatgtttgtgttcaactcccagagtttcacgttgcttttcatagagtagttctgaaacatgcttttcgtagtgtctgcaagtggacatttggagcgctttcaggcctgtggtggaaaacgaattatggtcacataaaaactggagagagccttctcagaaacttctctgtgatgattgcattcaactcacagagttgaaccctcctatggatagagcagtgttgaaactctctttttgtggaatctgcaagtggatatgtggacctctccgaagatgtctttggaaacgggaatatcttcacataaaaactaaacagaagcattctcagaaacttcttggtgatgtttgcattcaaatcccagagttgaaccttcctttgatagttcaggtttgaaacactctttttgtaggatctgcaagtggctatttggaccactctgtggccttcgttcgaaacgggtatatcttcgcataaaatctagacagaagcattctcagaaaatactttgtgatgattgagttgaactcacagagctgaacattcctttggatggagcaggtttgagacacactttttgtagaatctacaagtggatatttggacctctctgaggatttcgttggaaacgggataactgcacctaactaaacggaagccttctcagaaactgctttgtgatgattgcattcacctcacagagttgaacattcctattgatagagcagtttggaaacactcttgttgtggaatgtgcaagtggagatttggagcgctttgaggcctatggtagtaaagggaagagcttcatagaaaaacaagacagatgcattctcaggaactttttggtgatgtttgtattcaactcccagagttgaactttcctttggaaagagcagctatgaaacactgtttttctagaatctgcaagtggacgtttggagggctttgtggtttgtggtggaaaaggaaatatcttcacctaaatactagatagaagcatcctcagaagcttctctgtgatgactgcattcaactcacggagttgaacactccttttgagagcgcagttttgaaactctctttctgtggcatctgcaaggggacatgtagacctctttgaagatttcgttggaaacggaatcatcttcacataaaaactatacagaagcagtctcagaatcttctttgtgatgtttgcattcaaatccccgagttgaactttcctttcaaagttcacgtttgaaacactctttttgcaggatctacaagtggatatttggaccactctgtgtccttcgttcgaaacgggtatatcttcacatgacatctagacagaagctttctcagaaaattctttgggatgattgagttgaactcacagagctgaacattccttgcgatgtagcagtttagaaacacattttctgcagaatctgcaagtgcatatttggacctctgtgaggaattcgttggaaacgggataatttcagctgactaaacagaaacatactcagaaccttcttcgtgatgtctgcattcaactcacagtgtggaacctttctttgatagtgcaggtttgaaacactctttttgtacaaactgcaaggggataattgcacttccttgaggcctaccacagtaaaggaaataacttcctataaaaagaagacagaagcattctcagaaccctcttcgtgatgtttgcattcaactcacagtgctgaacctttctttgatagttcagctttgaaacactctttttgtagaaactgcaagtggatacttgttcctctctgaggatttcgttggaaacgggataaacctcacagaactaaacagaagcattctcagaaccttcttcgtgatgtttgcattcaactcacagtgttgaacctttctttgatagttcaggtttgaaacggtctttctgtagaaactgcaagtagatatttggacctctgctgaggatttcgttggaaacgggataaaccgcacagaactaaaacagaagcattcacagaaaactcttggtgacgactgagtttaactcacagagctgaacattcctttggatggagcagtttcgaaacacactatttgtagaatgtgcaagtggatatttgggcctctctgaggatttcgttggaaacgggataaaccgcacagaactaaacagaagcattctcagaaactactttgtgatgattgcattcaagtcacagagttgaacattccctttgacagagcagtttggaaactctctttgtgtagaatctgcaagtggagatatggaccgctttgaggcctatggtagtaaaggaaatagcttcatataaaagctagacagtaagcattctcagaaacttctttgtgatgcttgcattcaactcacagagttgaactttcctttcgagagagaagctttgaaacactctttttccagaatctgcaagtggacatttggagggctttgaggcctgtggtggaaaaggaattatcttcccgtaaaagctagatagaagcattgtcagaaacttctttgtgatgattgcattcaagtcacagagttgaaggttccttttcaaagagcagtttccaatcactctttctgtggaatctgcaagtggatatttggacctctttgaagatttcgttggaaacgggagaatcttcacagaaaagctaaacagaagcattctcagaaacttctctgtgatgtttgtgttcaactcccagagtttcacattgcttctcatagagtagttctgaaacatgcttttcgtagtgtctgcaagtggacatttggagcgctttcaggcctgtggtggaaaacgaattatggtcacataaaaactggagagaagccttctcagaaacttctctgtgatgattgcattcaactcactgagttgaaccctcctatggtcagagcagtgttgaaactctctttttgtggaatctgcaagtggatatgtggacctctccgaagatgtctttggaaacgggaatatcttcacataaaaactaaacagaagcattctcagaaacttcttggtgatgtttgcattcaaatcccagagttgaaccttcctttgagagttcaggtttgaaacactctttttgtaggatctgcaagtggatatttggaccactctgtggccttcgttcgaaacgggtacatcttcgcataaaatctagacagaagcattctcagaaaatactttgtgatgattgagttgaactcacagagctgaacattcctttggatggagcaggtttgagacacactttttgtagaatctacaagtggatatttggacctctctgaggatttcgttggaaacgggataaatacacctaactaaacgtaagcattctcagaaactgctttgtgatgattgcattcacctcacagagttgaacattcctattgatagagcagtttggaaacactcttgttgtggaatgtgcaagtggagatttggagcgctttgaggcctatggtagtaaagggaatagcttcatagaaaaactagacagatgcattctcaggaactttttggtgatgtttgtattcaactcccagagttgaactttcctttagaaagagcagctatgaaacactctttttctagaatctgcaagtggacgtttggagggctttgtggtttgtggtggaaaaggaaatatcttcacctaaatactagatagaagcattctcagaagcttctctgtgatgactgcattcaactcacggagttgaacactccttttgagagcgcagttttgaaactctctttctgtggcatctgcaaggggacatgtagacctctttgaagatttcgttggaaacggaatcatcttcacataaaaactatacagaagcagtctcagaatcttctttgtgatgtttgcattcaaatcccagagttgaactttcctttcaaagttcacgtttgaaacactctttttgcaggatctacaagtggatatttggaccactctgtgtccttcgtttgaaacgggtatatcttcacatgacatctagacagaagctttctcagaaaattctttgggatgattgagttgaactcacagagctgaacattccttgcgatggagcagtttagaaacacactttctgcagaatctgcaagtgcatatttggacctctctgaggaattcgttggaaacgggataatttcagctgactaaacagaagcattctcagaatcttcttcgtgatgtctgcattcaactcacagtgtggcacctttctttgatagttcaggtttgaaacactctttttgtagaaactgcaaggggataattgcacttctttgaggcctaccgtagtaaaggaaataacttcctatacaaagaagacagaagcattctcagaaccctcttcgtgatgtttgcattcaacacacagtgctgaacctttctttgatagttcagctttgaaacactctttttgtagaaactgcaagtggatatttggtcctctctgaggatttcgttggaaacgtgataaaccgcacagaactaaacagaagcattcacagaaaactcttggtgacgactgagtttaactcacagagctgaacattcctttggatggagcagtttcgaaacacactctttgtagaatctgcaagtggatatttgggcctctctaaggatttcgttggaaatgggataaaccgcacagaactaaaacaaaagcattctgagaaactactttgtgatgattgcattcaagtcacagagctgaacattccctttgacagagcagtttggaaactctctttgtgtagaatctgcaagtggagatatggaatgctttgaggactatggtagtaaaggtaatagcttcatagaaaagctagacagtagcattctcagaaacttctttgtgatgcttgcattcaactcacagagttgaactttcctttcgagagagaagctttgaaacactctttttccagaatctgcaagtggacatttggagggctttgaggcctgtggtggaaaaggaattatcttcccgtaaaagctggatagaagcattgtcagaaacttctttgtgatgattgtattcaactcacagagttgaaggttccttttcaaacagcagtttccaaacactctttctgtggaatctgcaagtggatgtttggacctctttgaagatttcgttggaaacgggagaatcttcacagaaaagctaaacagaagcattctcagaaacttctctgtgatgtttgtgttcaactcccagagtttcacgttgcttttcatagagtagttctgaaacatgcttttcgtagtgtctgcaagtggacatttggagcgctttcaggcctgtggtggaaaacgaattatggtcacataaaaactggagagaagccttctcaggaaacttctctgtgatgattgcattcaactcacagagttgaaccctcctatggatagagcagtgttgaaactctctttttgtggaatctgcaagtggatatgtggacctctccgaagatgtctttggaaacgggaatatcttcacataaaaactaaacagaagcattctcagaaacttcttggtgatgtttgcattcaaatcccagagttgaaccttcctttgatagttcaggtttgaaacactctttttgtaggatctgcaagtggctatttggaccactctgtggccttcgttcgaaacgggtatatcttcgcataaaatctagacagaagcattctcagaaaatactttgtgatgattgagtttaactcacagagctgaacattcctttggatggagcaggtttgagacacactttttgtagaatctacaagtggatatttggacctctctgaggatttcgatggaaacgggataactgcacctaactaaacggaagcattctcagaaactgctttgtgatgattgcattcacctcacagagttgaacattcctattgatagagcagtttggaaacactcttgttgtggaatgtgcaagtggagatttggagcgctttgaggtctatggtagtaaagggaatagcttcatagaaaaactagacagatgcattctcaggaactttttggtgatgtttgtattcaactcccagagttgaactttcctttggaaagagcagctatgaaacactctttttctagaatctgcaagtggacgtttggagggctttgtggtttgtggtggaaaaggatatatcttcacctaaatactagagagaaaaactgtaataaaaaaaagttgggaggctgaggtgagcaaatcacttgaggtcaagaattcgaaaacaaccttgccaaaatggaaaaaccatgtctctactaaaaatacaaaaaataaaaaaatgtggtggtgtacatctgcagctcaaaaacttgggaggctgaagcacaagaatcccttgaacctaaaatggaaggcaaaggctgcagtgagctgaaattgtgccaccacactccagcctgggtgaaaaagcaagaccctgtctcaagaaaaggaaaggaaaggaaaggaaaaggaaaggaaaggaaaggaaaggaaaggaaaggaaaggaaaggaaaggaaaggaaaggaaaggaaaggaaaggaaaggaaaggaaaggaaaggaatggaaaggaaagggaggggaggggagagaaaaaaaaaaatgctctatcaataggaatgttcaactctgtgaggtgaatgcaatcatcacaaagcagtttctgagaatgcttcnnnnnnnnnnnnnnnnnnnnnnnnnnnnnnnnnnnnnnnnnnnnnnnnnnnnnnnnnnnnnnnnnnnnnnnnnnnnnnnnnnnnnnnnnnnnnnnnnnnnagcagtctcagaatcttctttgtgatgtttgcattcaaatcccagagttgaactttcctttcaaagttcacgtttgaaacactctttttgcaggatctacaagtggatatttgaccactctgtgtccttcgttcgaaacgggtatatcttcacatgacatctagacagaagctttctcagaaaattctttggcatgattgagttgaactcacagagctgaacattccttgcgatgtagcagtttagaaacacactttctgcagaagctgcaagtgcatatttggacctctctgaggaattcgttggaaacgggataatttcagctgactaaacagaagcattctcagaaccttcttcgtgatgtctgcattcaactcacagtgtggaacctttctttgatagttcaggtttgaaacactctttttgtagaaactgcaaggggataattgcacttctttgaggcctaccgtagtaaaggaaataacttcctatagaaagaagacagaagcattctcagaaccctcttcgtgacgtttgcattcaactcacagtgctgaacctttctttgatagttcagctttgaaacactcttcttgtagaaactgcaagtggatatttggtcctctctgaggatttcgttggaaacgggataaaccgcacagaactaaacagaagcattctcagaaccttcttcgtgatgtttgcattcaactcacagtgttgaacctttctttgatagttcaggtttgaaacggtctttctgtagaaactgcaagtagatatttggacctctgctgaggatttcgttggaaacgggataaaccgcacagaactaaaacagaagcattcacagaaaactcttggtgacgactgagtttaactcacagagctgataattcctttggatggagcagtttcaaaacacactatttgtagaatgtgcaagtggatatgtgggcctctctgaggatttcgttggaaacgggataaaccgcacagaactaaaacagaagcattctcagaaactactttgtgatgattgcattcaagtcacagagttgaacattccctttgacagagcagtttggaaactctctttgtgtagaatctgcaagtggagatatggaccgctttgaggactatggtagtaaaggaaatagcttcatataaaagctagacagtagcattctcagaaacttctttgtgatgcttgcattcaactcacagagttgaactttcctttcgagagagaagctttgaaacactctttttccagaatctgcaagtggacatttggagggctttgaggcctgtggtggaaaaggaattaacttcccgtaaaagctagatagaagcattgtcagaaacttctttgtgatgattgcattcaactcacagagttgaaggttccttttcaaacagcagtttccaatcactctttctgtggaatctgcaagtggatatttgggcctctctgaggatttcgttggaaacgggataaaacgcacagaactaaaacagaagcattctcagaaacttctctgtgatgtttgtgttcaactcccagagtttcacgttgcttttcatagagtagttctgaaacatgcttttcgtagtgtctgcaagtggacatttggagcgctttcaggcctgtggtggaaaacgaattatggtcacataaaaactggagagaagccttctcagaaacttctctgtgatgattgcattcaactcacagagttgaaccctcctatggatagagcagtgttgaaactctctttttgtggaatctgcaagtggatatgtggacctctccgaagatgtctttggaaacgggaatatcttcacataaaaactaaacagaagcattctcagaaacttcttggtgatgtttgcattcaaatcccagagttgaacattcctttgacagttcaggtttgaaacactctttttgtaggatctgcaagtggatatttggaccactctgtggccttcgttcgaaacgggtacatcttcgcataaaatctagacagaagcattctcagaaaatactttgtgatgattgagttgaactcacagagctgaacattcctttggatggagcaggtttgagacacactttttgtagaatctacaagtggatatttggacctctctgaggatttcgttggaaacgggataactgcacctaactaaacggaagcattctcagaaactgctttgtgatgattgcattcacctcacagagttgaacattcctattgatagagcagtttggaaacactcttgttgtggaatgtgcaagtggagatttggagcgctttgaggtctatggtagtaaagggaatagcttcatagaaaaactagacagatgcattctcaggaactttttggtgatgtttgtattcaactcccagagttgaactttcctttggaaagagcagctatgaaacactctttttctagaatctgcaagtggacgtttggagggctttgtggtttgtggtggaaaaggaaatatcttcacctaaatactagatagaagcattctcagaagcttctctgtgatgactgcattcaactcacggagttgaacactccttttgagagcgcagttttgaaactctctttctgtggcatctgcaaggggacatgtagacctctttgaagatttcgttggaaacggaatcatcttcacataaaaactatacagaagcagtctcagaatcttctttgtgatgtttgcattcaaatcccagagttgaactttcctttcaaagttcacgtttgaaacactctttttgcaggatctacaagtggatatttggaccactctgtgtccttcgttcgaaacgggtatatcttcacacgacatctagacagaagctttctcagaaaattctttgggatgattgagtggaactcacagagctgaacattccttgcgatgtagcagtttagaaacacactttctgcagaatctgcaagtgcatatttggacctctctgaggaattcgttggaaacgggataatttcagctgactaaacaagaagcattctcagaaccttcttcgtgatgtctgcattcaactcacagtgtggaacctttctttgatagttcaggtttgaaacactctttttgtagaaactgcaaggggataattgcacttctttgaggcctaccgtagtaaaggaaataacttcctatagaaagaagacagaagcattctcagaaccctcttcgtgatgtttgcattcaactcacagtgctgaacctttctttgatagtgcagctttgaaacactcttcttgtagaaactgcaagtggatatttggtcctctctgaggatttcgttggaaacgggataaaccgcacagaactaaacagaagcattctcagaaccttcttcgtgatgtttgcattcaactcacagtgttgaacctttctttgatagttcaggtttgaaacggtctttctgtagaaactgcaagtagatatttggacctctctgaggatttcgttggaaacgggataacccgcacagaactaaaacagaagcattcacagaaaactcttggtgacgactgagtttaactcacagagctgaacattcctttggatggagcagtttcaaaacacactatttgtagaatctgcaagtggatatgtgggcctctctgaggatttcgttggaaacgggataaaccgcacagaactaaaacagaagcattctcagaaactactttgtgatgattgcattcaagtcacagagttgaacattccctttgacagagcagtttggaaactctctttgtgtagaatctgcaagtggagatatggaccgctttgaggcctatggtagtaaaggaaatagcttcatataaaagctagacagtagcattctcagaaacttctttgtgatgcttgcattcaactcacagagttgaactttcctttcgagagagaagctttgaaacactctttttccagaatctgcaagtggacatttggagggctttgaggcctgtggtggaaaaggaattaacttcccgtaaaagctagatagaagcattgtcagaaacttctttgtgatgattgcattcaactcacagagatgaaggttcctttacaaacagcagtttccaaacactctttctgtggaatctgcaagtggatatttggacctctttgaagatttcgttggaaacgggagaatcttcacagaaaagctaaacagaagcattctcagaaacttctctgtgatgtttgtgttcaactcccagagtttcacgttgcttttcatagagtagttctgaaacatgcttttcgtagtgtctgcaagtggacatttggagcgctttcaggcctgtggtggaaaacgaattatggtcacataaaaactggagagaagccttctcagaaacttctctgtgatgattgcattcaactcacagagttgaaccctcctatggatagagcagtgttgaaactctctttttgtggaatctgcaagtggatatgtggacctctccgaagatgtctttggaaacgggaatatcttcacataaaaactaaacagaagcattctcagaaacttcttggtgatgtttgcattcaaatcccagagttgaaccttcctttgatagttcaggtttgaaacactctttttgtaggatctgcaagtggctatttggaccactctgtggccttcgtttgaaacgggtatatcttcgcataaaatctagacagaagcattctcagaaaatactttgtgatgattgagtttaaatcacagagctgaccattcctttggatggagcaggtttgagacacactttttgtagaatctacaagtggatatttggacctctctgaggatttcgttggaaacgggataactgcacctaactaaacggaagcattctcagaaactgctttgtgatgattgcattcacctcacagagttgaacattcgtattgatagagcagtttggaaacactcttcttgtggaatgtgcaagtggagatttggagcgctttggggcctatggtagtaaagggaatagcttcatagaaaaactagacagatgcattctcaggaactttttggtgatgtttgtattcaactcccagagttgaactttcctttggaaagagcagctatgaaacactctttttctagaatctgcaagtggacgtttggagggctttgtggtttgtggtggaaaaggaaatatcttcacctaaatactagacagaagcattctcagaagcttctctgtgatgactgcattcaactcacggagttgaacactccttttgagagcgcagttttgaaactctctttctgtggcatctgcaaggggacatgcagacctctttgaagatttcgttggaaacggaatcatcttcacataaaaactatacagaagcagtctcagaatcttctttgtgatgtttgcattcaaatcccagagttgaactttcctttcaaagttcacgtttgaaacactctttttgcaggatctacaagtggatatttggaccactctgtgtccttcgttcgaaacgggtatatcttcacacgacatctagacagaagctttctcagaaaattctttgggatgattgagtggaactcacagagctgaacattccttgcgatgtagcagtttagaaacacactttctgcagaatctgcaagtgcatatgtggacctctctgaggaattcgttggaaacgggataatttcagctgactaaacagaagcattctcagaaccttcttcgtgatgtctgcattcaactcacagtgtggaacctttctttgatagttcaggtttgaaacactctttttgtagaaactgcaaggggataattgcacttctttgaggcctaccgtagtaaaggaaataacttcctatagaaagaagacagaagcattctcagaaccctcttcgtgatgtttgcattcaactcacagtgctgaacctttctttgatagttcagctttgaaacactcttcttgttgaaactgcaagtggatatttggtcctctctgaggatttcgttggaaacgggataaaccgcacagaactaaacagaagcattctcagaaccctcttcgtgatgtttgcattcaactcacagtgttgaacctttctttgatagttcagctttgaaacggtctttctgtagaaactgcaagtagatatttggacctctctgaggatttcgttggaaacgggataaaccgcacagaactaaaacagaagcattcacagaaaactcttggtgacgactgagtttaactcacagagctgaacattcctttggatggagcagtttcgaaacacactatttgtagaatctgcaagtggatatttgggcctctctgaggatttcgttggaaacgggataaaacgcacagaactaaaacagaagcattctcagaaactactttgtgatgattgcattcaagtcacagagttgaacattccctttgacagagcagtttggaaactctctttgtgtagaatctgcaagtggagatatggaccgctttgaggcctatggaagtaaaggaaatagcttcatataaaagctagacagtagcattctcagaaacttctttgtgatgcttgcattcaactcacagagttgaactttcctttcgagagagaagctttgaaacactctttttccagaatgtgcaagtggacatttggggagctttgaggcctgtggtggaaaaggaattatcttcccgtaaaagctagatagaagcattgtcagaaacttctttgtgatgattgcattcaactcacagagttgaaggttccttttcaaacagcagtttccaatcactctttctgtggaatctgcaagtggatatttggacctattttgaagatttcgttggaaacgggagaatcttcacagaaaagctaaacagaagcattctcagaaacttctctgtgatgtttgtgttcaactcccagagtttcacattgcttctcatagagtagttctgaaacatgcttttcgtagtgtctgcaagtggacatttggagcgctttcaggcctgtggtggaaaacgaattatggtcacataaaaactggagagaagccttctcagaaacttctctgtgatgattgcattcaactcacagagttgaaccctcctctggatagagcagtgttgaaactctctttttgtggaatctgcaagcggatatgtggacctctccgaagatgtctttggaaacgggaatatcttcacataaaaactaaacagaagcattctcagaaacttcttggtgatgtttgcattcaaatcccagagttgaaccttcctttgagagttcaggtttgaaacactctttttgtaggatctgcaagtggatatttggaccactctgtggccttcgttcgaaacgggtacatcttcgcataaaatctagacagaagcattctcagaaaatactttgtgattattgagtttaactcacagagctgaacattcctttggatggagcaggtttgagacacactttttgtagaatctacaagtggatatttggacctctctgaagatttcgttggaaacgggataactgcacctaactaaacggaagcattctcagaaactgctttgtgatgattgcattcacctcacagagttgaacattcctattgatagagcagtttggaaacactcttgttgtggaatgtgcaagtggagatttggagcgctttgaggcctatggtagtaaagggaatagcttcatagaaaaactagacagatgcattctcaggaactttttggtgatgtttttattcaactcccagagttgaactttcctttgcaaagagcagctatgaaacactctttttctagaatctgcaagtggacgtttggagggctttgtggtttgtggtggaaaaggaaatatcttcacctaaatactagatagaagcattctcagaagcttctctgtgatgactgcattcaactcacggagttgaacactccttttgagagcgcagttttgaaactctctttctgtggcatctgcaaggggacatgtagacctctttgaagatttcgttggaaacggaatcatcttcacataaaaactatacagaagcagtctcagaatcttctttgtgatgtttgcattcaaatcccagagttgaactttcctttcaaagttcacgtttgaaacactctttttgcaggatctacaagtggatatttggaccactctgtgtccttcgttcgaaacgggtataacttcacacgacatctagacagaagctttctcagaaaattctttgggatgattgagtggaactcacagagctgaacattccttgcgatgtagcagtttagaaacacactttctgcagaatctgcaagtgcatatttggacctctctgaggaattcgttggaaacgggataatttcagctgactaaacagaagcattctcagaaccttcttcgtgatgtctgcattcaactcacagtgtggaacctttctttgatagttcaggtttgaaacactctttttgtagaaactgcaaggggataattgcacttctttgaggcctaccgtagtaaaggaaataacttcctatagaaagaagacagaagcattctcagaaccctcttcgtgatgttcgcattcaactcacagtgctgaacctttctttgatagttcagctttgaaacactcttcttgtagaaactgcaagtggatatttggtcctctctgaggatttcgttggaaacgggataaaccgcacagaactaaacagaagcattctcagagccctcttcgtgatgtttgcattcaactcacagtgctgaacctttctttgatagtgcagctttgaaacactctttttgtagaaactgcaagtggatgtttggtcctctctgaggatttcgttggaaacgggataaaccgcacagaactaaaacagaagcattgtcagaaacttctttgtgatgattgcattcaactcacagagttgaaggttccttttcaaacagcagtttccaatcactctttctgtggaatctgcaagtggatatttgggcctctctgaggatttcgttggaaacgggataaaacgcacagaactaaaacagaagcattctcagaaacttctctgtgatgtttgtgttcaactcccagagtttcacgttgcttttcatagagtagttctgaaacatgcttttcgtagtgtctgcaagtggacatttggagcgctttcaggcctgtggtggaaaacgaattatggtcacataaaaactggagagaagccttctcagaaacttctctgtgatgattgcattcaactcacagagttgaaccctcctatggatagagcagtgttgaaactctctttttgtggaatctgcaagtggatatgtggacctctccgaagatgtctttggaaacgggaatatcttcacataaaaactaaacagaagcattctcagaaacttcttggtgatgtttgcattcaaatcccagagttgaaccttcctttgatagttcaggtttgaaacactctttttgtaggatctgcaagtggatatttggaccactctgtggccttcgttcgaaacgggtatatcttcgcataaaatctagacagaagcattctcagaaaatactttgtgaagattgagtttaactcacagagctgaacattcctttggatggtgcaggtttgagacacactttttgtagaatctacaagtggatatttggacctctctgaggatttcgttggaaacgggataactgcacctaactaaacggaagcattctcagaaactgctttgtgatgattgcattcacctcacagagttgaacattcctattgatagagcagtttggaaacactcttgttgtggaatgtgcaagtggagatttggagcgctttgaggcctatggtagtaaagggaatagcttcatagaaaaactagacagatgcattctcaggaactttttggtgatgtttgtattcaactcccagagttgaactttcctttggaaagagcagctatgaaacactctttttctagaatctgcaagtggacgtttggagggctttgtggtttgtggtggaaaaggaaatatcttcacctaaatactagatagaagcattctcagaagcttctctgtgatgactgcattcaactcacggagttgaacactccttttgagagcgcagttttgaaactctctttctgtggcatctgcaaggggacatgtagacctcttggaagatttcgttggaaacggaatcatcttcacataaaaactatacagaagcagtctcagaatcttctttgtgatgtttgcattcaaatccccgagttgaactttcctttcaaagttcacgtttgaaacactctttttgcaggatctacaagtggatatttggaccactctgtgtccttcgttcgaaacgggtatatcttcacatgacatctagacagaagctttctcagaaaattctttgggatgattgagtggaactcacagagctgaacattccttgcgatgtagcagtttagaaacacactttctgcagaatctgcaagtgcatatttggacctctctgaggaattcgttggaaacgggataatttcagctgactaaacagaagcattcacagaaccttcttcgtgatgtctgcattcaactcacagtgtggaacctttctttgatagttcagctttgaaacactctttttgtagaaactgcaaggggataattgcacttctttgaggcctaccgtagtaaaggaaataacttcctatagaaagaagacagaagcattctcagaaccctcttcgtgatgtttgcattcaactcacagtgctgaacctttctttgatagttcagctttgaaacactcttcttgtagaaactgcaagtggatatttggtcctctctgaggatttcgttggaaacgggataaaccgcacagaactaaacagaagcattctcagaaccttcttcgtgatgtttgcattcaactcacagtgttgaacctttctttgatagttcaggtttgaaacggtctttctgtagaaactgcaagtagatatttggacctctctgaggatttcgttggaaacgggataaaccgcacagaactaaaacagaagcattcacagaaaactcttggtgacgactgagtttaactcacagagctgaacattcctttggatggagcagtttcgaaacacactatttgtagaatgtgcaagtggatatttgggcctctctgaggatttcgttggaaacgggataaaccgcacagaactaaacagaagcattctcagaaactactttgtgatgattgcattcaagtcacagagttgaacattccctttgacagagcagtttggaaactctctttgtgtagaatctgcaagtggagatatggaccgctttgaggcctatggtagtaaaggaaatagcttcatataaaagctagacagtagcattctcagaaacttctttgtgatgcttgcattcaactcacagagttgaactttcctttcgagagagaagctttgaaacactctttttccagaatgtgcaagtggacatttggggagctttgaggcctgtggtggaaaaggaattatacttcccgtaaaagctagatagaagcattgtcagaaacttctttgtgatgattgcattcaactcacagagttgaaggttccttttcaaacagcagtttccaatcactctttctgtggaatctgcaagtggatatttcgacctctttgaagatttcgttggaaacgggagaatcttcacagaaaagctaaacagaagcattctcagaaacttctctgtgatgtttgtgttcaactcccagaatttcacattgcttttcatagagtagttctgaaacatgcttttcgtagtgtctgcaagtggacatttggagtgctttcaggcctgtggtggaaaacgatttatggtcacataaaaactggagagaagccttctcagaaacttctctgtgatgattgcattcaactcacagagttgaaccctcctatggatagagcagtgttgaaactctctttttgtggaatctgcaagtgtatatgtggacctctccgaagatgtctttggaaacgggaatatcttcacataaaaactaaacagaagcattctcagaaacttcttggtgatgtttgcattcaaatcccagagttgaaccttcctgtgatagttcaggtttgaaactctctttttgtaggatctgcaagtggatatttggaccactctgtggccttcgttcgaaacgggtacatcttcacataaaatctagacagaagcattctcagaaaatactttgtgatgattgagtttaactcacagagctgaacattcctttggatggagcaggtttgagacacactttttgtagaatctacaagtggatatttggacctctctgaggatttcgttggaaacggtataactgcacctaactaaacggaagcattctcagaaactgctttgtgatgattgcattcacctcacagagttgaacattcctattgatagagcagtttggaaacactcttgttgtggaatgtgcaagtggagatttggagcgctttgtggcctatggtagtaaagggaatagcttcatagaaaaactagacagatgcattctcaggaactttttggtgatgtttgtattcaactcccagagttgaactttcctttggaaagagcagctatgaaacactctttttctagaatctgcaagtggacgtttggagggctttgtggtttgtggtggaaaaggaaatatcttcacctaaatcctagagagaagcattctcagaagcttctctgtgatgactgcattcaactcacggagttgaacactccttttgagagcgcagttttgaaactctctttctgtggcatctgcaaggggacatgtagacctctttgaagatttcgttggaaacggaatcatcttcacataaaaactatacagaagcagtctctgaatcttctttgtgatgtttgcattcaaatcccagagttgaactttcctttcaaagttcacgtttgaaacactctttttgcaggatctacaagtggatatttggaccactctgtgtccttcgttcgaaacgggtatatcttcacatgacatctagacagaagctttctcagaaaattctttgggatgattgagtggaactcacagagctgaacattccttgcgatgtagcagtttagaaacacactttctgcagaatctgcaagtgcatatttggacctctctgaggaattcgttggaaacgggataatttcagctgactaaacagaagcattctcagaacttcttcgtgatgtctgcattcaactcacagtgtggaacctttctttgatagttcaggtttgaaacactctttttgtagaaactgcaaggggataattgcacttctttgaggcctaccgtagtaaaggaaataacttcctatagaaagaagacagaagcattctcagagccctcttcgtgatgtttgcattcaactcacagtgctgaacctttctttgatagtgcagctttgaaacactctttttgtagaaactgcaagtggatgtttggtcctctctgaggatttcgttggaaacgggataaaccgcacagaactaaaacagaagcattcacagaaaactcttggtgacgactgagtttaactcacagagctgaacattcctttggatggagcagtttcgaaacacactatttgtagaatctgcaagtggatatttgggcctctctgaggatttcgttggaaacgggataaaacgcacagaactaaaacagaagcattctcagaaactactttgtgatgattgcattcaagtcacagagttgaacattccctttgacagagcagtttggaaactctctttgtgtagattctgcaagtggagatatggaccgctttgagacctatggtagtaaaggaaatagcttcatataaaagctagacagtagcattctcagaaacttctttgtgatgcttgcattcaactcacagagttgaactttcctttcgagagagaagctttgaaacactctttttccagaatctgcaagtggacatttggagggatttgaggcctgtggtggaaaaggaattatcttcccgtaaaagctagatagaagcattgtcagaaacttctttgtgatgattgcattcaactcacagagttgaaggttccttttcaaacagcagtttccaatcactctttctgtggaatctgcaagtggatatttgggcctctctgaggatttcgttggaaacgggataaaacgcacagaactaaaacagagagcattctcagaaacttctctgtgatgtttgtgttcaactcccagagtttcacgttgcttttcatagagtagttctgaaacatgcttttcgtagtgtctgcaagtggacatttggagcgctttcaggcctgtggtggaaaacgaattatggtcacataaaaactggagagagccttctcagaaacttctctgtgatgattgcattcaactcacagagttgaaccctcctatggatagagcagtgttgaaactctctttttgtggaatctgcaagtggatatgtggacctctccgaagatgtctttggaaacgggaatatcttcacataaaaactaaacagaagcattctcagaaacttcttggtgatgtttgcattcaaatcccagagttgaaccttcctttgatagttcaggtttgaaacactctttttgtaggatctgcaagtggatatttggaccactctgtggccttcgttcgaaacgggtacatcttcgcataaaatctagacagaagcattctcagaaaatactttgtgatgattgagtttaactcacagagctgaacattcctttggatggagcaggtttgagacacaccttttgtagaatctacaaggggatatttggacctctcctgaggatttcgttggaaacgggataactgcacctaactaaacggaagcattctcagaaactgctttgtgatgattgcattcacctcacagagttgaacattcctattgatagagcagtttggaaacactcttgttgtggaatgtgcaagtggagatttggagcgctttgaggcctgtggtagtaaagggaatagcttcatagaaaaactagacagatgcattctcaggaactttttggtgatgtttgtattcaactcccagagttgaactttcctttggaaagagcagctatgaaacactctttttctagaatctgcaagtggacgtttggagggctttgtggttttgtggtggaaaaggaaatatcttcacctaaatactagatagaagcattctcagaagcttctctgtgatgactgcattcaactcacggagttgaacactccttttgagagcgcagttttgaaactctctttctgtggcatctgcaaggggacatgtagacctctttgaagatttcgttggaaacggaatcatcttcacataaaaactatacagaagcagtctcagaatcttctttgtgatgtttgcattcaaatcccagagttgaactttcctttcaaagttcacgtttgaaacactctttttgcaggatctacaagtggatatttggaccactctgtgtccttcgttcgaaacgggtatatcttcacatgacatctagacagaagctttctcagaaaattctttgggatgattgagttgaactcacagagctgaacattccttgtgatggagcagtttagaaacacactttctgcagaatctgcaagtgcatatttggacctctctgaggaattcgttggaaacgggataatttcagctgactaaacagaagcattctcagaaccttcttcgtgatgtctgcattcaactcacagtgtggaacctttctttgatagttcaggtttgaaacactctttttgtagagactgcaaggggataattgcacttctttgaggccaaccatagtaaaggaaataacttcctataaaaagaagacagaagcattctcagaaccctcttcgtgatgtttgcattcaactcacagtgctgaaactttctttgatagttcagctttgaaacactctttttgtagaaactgcaagtggatacttggtcctctcagaggatttcgttggaaaagggataaaccgcacagaactaaacagaagcattcacagaaaactcttggtgatgactgagtttaacttacagagctgaacattcctttggagggagcagtttcgaaacacactatttgtagaatctgcaagtggatatttgggcctctctgaggatttcgatagaaacgggataaaccgcacagaactaaaacagaagcattctcagaaactactttgtgatgattgcattcaagtcacagagctgaacattccctttgacagagcagtttggaaactctctttgtgtagaatctgcaagtggaggtatggaatgctttgaggactattggtagtaaaggaaatagcttcatataaaagctagacagtagcattctcagaaacttctttgtgatgcttgcattcaactcacagatgttgaactttcctttcgagagagaagctttgaaacactctttttccagaatctgcaagtggacatttggagggctttgaggcctgtggtggaaaaggaattatcttcccgtaaaagctagatagaagcattgtcagaaacttctttgtgatgattgcattcaactcacagagttgaaggttccttttcaaacagcagtttccaatcactctttctgtggaatctgcaagtggatatttgggcctctctgaggatttcgttggaaacgggataaaacgcacagaactaaaacagaagcattctcagaaacttctctgtgatgtttgtgttcaactcccagagtttcaccgttgcttttcatagagtagttctgaaacatgcttttcgtagtgtctgcaagtggacatttggagcgctttcaggcctgtggtggaaaacgaattatggtcacataaaaactggagagaagccttctcagaaacttctctgtgatgattgcattcaactcacagagttgaaccctcctatggatagagcagtgttgaaactctctttttgtggaatctgcaagtggatatgtggacctctccgaagatgtctttggaaacgggaatatcttcacataaaaactaaacagaagcattctcagaatcttcttggtgatgtttgcattcaaatcccagagttgaaccttcctttgatacttcaggtttgaaacactctttttgtaggatctgcaagtggatatttggaccactctgtggccttcgttcgaaacgggtatatcttcgcataaaatctagacagaagcattctcagaaaatactttgtgatgattgagttgaactcacagagctgaacattcctttggatggagcaggtttgagacacactttttgcagaatctacaagtggatatttggacctctctgaggatttcgttggaaacgggataactgcacctaactaaacggaagcattctcagaaactgctttgtgatgattgcattcacctcacagagttgaacattcctattgatagagcagtttggaaacactcttgttgtggaatgtgcaagtggagatttggagcgctttgaggcctgtggtagtaaagggaatagcttcatagaaaaactagacagatgcattctcaggtaactttttggtgatgtttgtattcaactcccagagttgaactttcctttggaaagagcagctatgaaacactctttttctagaatctgcaagtggacgtttggagggctttgtggtttgtggtggaaaaggaaatatcttcacctaaatactagatagaagcattctcagaagcttctctgtgatgactgcattcaactcacggagttgaacactccttttgagagcgcagttttgaaactctctttctgtggcatctgcaaggggacatgtagacctctttgaagatttcgttggaaacggaatcatcttcacataaaaactatacagaagcagtctcagaatcttctttgtgatgtttgcattcaaatcccagagttgaacttgcctttcaaagttcacgtttgaaacactctttttgcaggatctacaagtggatatttggaccactctgtgtccttcgttcgaaacgggtatatcttcacatgacatctagacagaagctttctcagaaaatcctttgggatgattgagtggaactcacagagctgaacattccttgcgatgtagcagtttagaaacacactttctgcagaatctgcaagtgcatatgtggacctctctgaggaattcgttggaaacgggataatttcagctgactaaacagaagcattctcagaaccttcttcgtgatgtctgcattcaactcacagtgtggaacctttctttgatagttcaggtttgaaacactctttttgtagaaactgcaaggggataattgcacttctttgaggcctaccgtagtaaaggaaataacttcctatagaaagaagacagaagcattctcagaaccctcttcgtgatgtttgcattcaactcacagtgctgaacctttctttgatagttcagctttgaaacactcttcttgtagaaactgcaagtggatatttggtcctctctgaggatttcgttggaaacgggataaaccgcacagaactaaacagaagaattctcagagccctcttcgtgatgtttgcattcaactcacagtgctgaacctttctttgatagtgcagctttgaaacactctttttgtagaaactgcaagtggatatttggtcctctctgaggatttcgttggaaacgggataaaccgcacagaactaaaacagaagcattgtcagaaacttctttgtgatgattgcattcaactcacagagttgaaggttccttttcaaacagcagtttccaatcactctttctgtggaatctgcaagtggatatttgggcctctctgaggatttcgttggaaacgggataaaacgcacagaactaaaacagaagcattctcagaaacttctctgtgatgtttgtgttcaactcccagagtttcacattgcttttcatagagtagttctgaaacatgcttttcgtagtgtctacaagtggacatttggagcgctttcaggcctgtggtggaaaacgaattatggtcacataaaaactggagagaagccttctcagaaacttctctgtgatgattgcattcaactcacagagttgaaccctcctatggatagagcagtgttgaaactctctttttgtggaatctgcaagtggatatgtggacctctccgaagatgtctttggaaacgggaatatcttcacataaaaactaaacagaagcattctcagaaacttcttggtgatgtttgcattcaaatcccagagttgaaccttcctttgatagttcaggtttgaaacactctttttgtaggatctgcaagtggatatttggaccactctgtggccttcgttcgaaacgggtatatcttcgcataaaatctagacagaaagcattctcagaaaatactttgtgatgattgagttgaactcacagagctgaacattcctttggatggagcaggtttgagacacactttttgtagaatctacaagaggatatttggacctctctgaggatttcgttggaaacgggataactgcacctaactaaacggaagcattctcagaaactgctttgtgatgattgcattcacctcacagagttgaacattcctattgatagagcagtttggaaacactcttgttgtggaatgtgcaagtggagatttggagcgctttgaggtctatggtagtaaagggaatagcttcatagaaaaactagacagatgcattctcaggaactttttggtgatgtttgtattcaactcccagagttgaactttcctttggaaagagcagctatgaaacactctttttctagaatctgcaagtggacgtttggagggctttgtggtttgtggtggaaaaggaaatatcttcacctaaatactagatagagtcattctcagtaagcttctctgtgatgactgcattcaactcacggagttgaacactccttttgagagcgcagttttgaaactctctttctgtggcatctgcaaggggacatgtagacctctttgaagatttcgttggaaacggaatcatcttcacataaaaactatacagaagcagtctcagaatcttctttgtgatgtttgcattcaaatcccagagttgaactttcctttcaaagttcacgtttgaaacactctttttgcaggatctacaagtggatatttggaccactctgtgtccttcgttcgaaacgggtatatctttcacacgacatctagacagaagctttctcagaaaattctttgggatgattgagtggaactcacagagctgaacattccttgcgatgtagcagtttagaaacacactttctgcagaatctgcaagtgcatatttggacctctctgaggaattcgttggaaacgggataatttcagctgactaaacagaagcattctcagaaccttcttcgtgatgtgtgcattcaactcacagtgtggaacctttctttgatagttcaggtttgaaacactctttttgtagaaactgcaaggggataattgcacttctttgaggcctaccgtagtaaaggaaataacttcctatagaaagaagacagaagcattctcagaaccctcttcgtgatgtttgcattcaactcacagtgctgaacctttctttgatagttcagctttgaaacactcttcttgtagaaactgcaagtggatatttggtcctctctgaggatttcgttggaaacgggataaaccgcacagaactaaacagaagaattctcagagccctcttcgtgatgtttgcattcaactcacagtgctgaacctttctttgatagtgcagctttgaaacactctttttgtagaaactgcaagtggatgtttggtcctctctgaggatttcgttggaaacgggataaaccgcacagaactaaaacagaagcattgtcagaaacttctttgtgatgattgcattcaactcacagagttgaaggttccttttcaaacagcagtttccaatcactctttctgtggaatctgcaagtggatatttgggcctctctgaggatttcgttggaaacgggataaaacgcacagaactaaaacagaagcattctcagaaacttctctgtgatgtttgtgttcaactcccagagtttcacgttgcttttcatagagtagttctgaaacatgcttttcgtagtgtctgcaagtggacatttggagcgctttcaggcctgtggtggaaaacgaattatggtcacataaaaactggagagaagccttctcagaaacttctctgtgatgattgcattcaactcacagagttgaaccctcctatggatagagcattgttgaaactctctttttgtggaatctgcaagtggatatgtggacctctccgaagatgtctttggaaacgggaatatcttcacataaaaactaaacagaagcattctcagaaacttcttggtgatgtttgcattcaaatcccagagttgaaccttcctttgatagttcaggtttgaaacactctttttgtaggatctgcaagtggatatttggaccactctgtggccttcgttcgaaacgggtacatcttcgcataaaatctagacagaagcattctcagaaaatactttgtgatgattgagtttaactcacagagctgaacattcctttggatggagcaggtttgagacacactttttgtagaaactacaagtggatatttggacctctctgaggatttcgttggaaacgcgataactgcacctaattaaacggaagcattctcagaaactgctttgtgatgattgcattcacctcacagagttgaacattcctattgatagagcagtttggaaacactcttgttgtggaatgtgcaagtggagatttggagcgctttgaggcctatggtagtaaagggaatagcttcatagaaaaactagacagatgcattctcaggaactttttggtgatgtttgtattcaactcccaagagttgaactttcctttggaaagagcagctatgaaacactctttttctagaatctgcaagtggacgtttggagggctttgtggtttgtggtggaaaaggaaatatcttcacctaaatactagatagaagcattctcagaagcttctctgtgatgactgcattcaactcacggagttgaacactccttttgagagcgcagttttgaaactctctttctgtggcatctgcaaggggacatgtagacctctttgaagatttcgttggaaacggaatcatcttcacataaaaactatacagaagcagtctcagaatcttctttgtgatgtttgcattcaaatcccagagttgaactttcctttcaaagttcacgtttgaaacactctttttgcaggatctacaagtggatatttggaccactctgtgtccttcgttcgaaacgggtataacttcacacgacatctagacagaagctttctcagaaaattctttgggatgattgagtggaactcacagagctgaacattccttgcgatggagcagtttagaaacacactttctgcagaatctgcaagtgcatatttggacctctctgaggaattcgttggaaacgggataatttcagctgactaaacagaagcattctcagaaccttcttcgtgatgtctgcattcaactcacagtgtggaacctttctttgatagttcaggtttgaaacactctttttgtagaaactgcaaggggataattgcacttctttgaggcctaccgtagtaaaggaaataacttcctatagaaagaagacagaagcattctcagaaccctcttcgtgatgtttgcattcaactcacagtgctgaacctttctttgatagttcagctttgaaacactcttcttgtagaaactgcaagtggatatttggtcctctctgaggatttcgttggaaacgggataaaccgcccagaactaaacagaagcattctaagaaccgtcctcgtgatgtttgcattcaactcacagtgctgaacctttctttgatagttcagctttgaaacactctttttgtagaaactgcaagtggatacttggtcctctctgaggatttctttggaaaagggataaaccgcacagaacaaaacagaagcattcacagaaaacacttggtgacgactgagtttaactcacagagctgaacattcctttggcgggagcagtttcgaaacacactatttgcagaatctgcaagtggatatttgggcctctctgaggatttcgatggaaacgggataaaccgcacagaactaaaacagaagcattctcagaaactactttgtgatgattgcattcaagtcacagagctgaacattccctttgacagagcagtttggaaactctctttgtgtagaatctgcaagtggagatatggaatgctttgaggactatggtagtaaaggaaatagcttcatataaaagctagacagtagcattctcagaaacttctttgtgatgcttgcattcaactcacagagttgaactttcctttcgagagagaagctttgaaacactctttttccagaatctgcaagtggacatttggagggctttgaggcctgtggtggaaaaggaattatcttcccgtaaaagctagatagaagcattgtcagaaacttctttgtgatgattgcattcaactcacagagttgaaggttccttttcaaacagcagtttccaatcactctttctgtggaatctgcaagtggatatttgggcctctctgaggatttcgttggaaacgggataaaacgcacagaactaaaacagaagcattctcagaaacttctctgtgatgtttgtgttcaactcccagagtttcacattgcttttcatagagtagttctgaaacatgcttttcgtagtgtctgcaagtgtacatttggagcgctttcaggcctgtggtggaaaacgaattatggtcacataaaaactggagagaaagccttctcagaaacttctctgtgatgattgcattcaactcacagcagttgaaccctcctatggatagagcagtgttgaaactctctttttgtggaatctgcaagtggatatgtggacctctccgaagatgtctttggaaacgggaatatcttcacataaaaactaaacagaagcattctcagaaacttcttggtgatgtttgcattcaaatcccagagttgaaccttcctttgatagttcaggtttgaaacactctttttgtaggatctgcaagtggatatttggaccactctgtggccttcgttcgaaacgggtacatcttcgcataaaatctagacagaagcattctcagaaaatactttgtgatgattgagtttaactcacagagctgaacattcctttggatggagcaggtttgagacacactttttgtagaatctacaagtggatatttggacctctctgaggatttcgttggaaacgggataactgcacctaactaaacggaagcattctcagaaactgctttgtgatgattgcattcacctcacagagttgaacattcctattgatagagcagtttggaaacactcttgttgtggaatgtgcaagtggagatttggagtgctttgaggcctatggtagtaaagggaatagcttcatagaaaaactagacagatgcattctcaggaactttttggtgatgtttgtattcaactcccagagttgaactttcctttggaaagagcagctatgaaacactgtttttctagaatctgcaagtggacgtttggagggctttgtggtttgtggtggaaaaggaaatatcttcacctaaatactagatagaagcattctcagaagcttctctgtgatgactgcattcaactcacggagttgaacactccttttgagagcgcagttttgaaactctctttctgtggcatctgcaaggggacatgtagacctctttgaagatttcgttggaaacggaatcatcttcacatcaaaactatacagaagcagtctcagaatcttctttgtgatgtttgcattcaaatcccagagttgaactttcctttccaagttcacgtttgaaacactctttttgcaggatctgcaagtggatatttggaccactctgtgtccttcgttcgaaacgggtatatcttcacatgacatctagacagaagctttctcagaaaattccttgggatgattgagttgagcaaacagagctgaacactccttgcgatgtagcagtttagaaacacactttctgcagaatctgcaagtgcatatgtggacctctctgaggaaatcgttggaaacgggataatttcagctgactaaacagaagcattctcagaaccttcttcgtgatgtctgcattcaactcacagtgtggaacctttctttgacagttcaggtttgaaacactctttttgtagaaactgcaaggggatcattgcacttctttgaggcctaccgtagtaaaggagataacttcctataaaaagaagacagaagaattctcagagccctcttcgtgatgtttgcattcaactcacagtgctgaacctttctttgatagtgcagctttgaaacactctttttgtagaaactgcaagtggatgtttggtcctctctgaggatttcgttggaaacgggataaaccgcacagaactaaaacagaagcattgtcaggaaacttctttgtgatgattgcattcaactcacagagttgaaggttccttttcaaacagcagtttccaatcactctttctgtggaatctgcaagtggatatttgggcctctctgaggatttcgttggaaacgggataaaacgcacagaactaaaacagaagcattctcagaaacttctctgtgatgtttgtgttcaactcccagagtttcacattgcttttcatagagtagttctgaaacatgcttttcgtagtgtctacaagtggacatttggagcgcttccaggcctgtggtggaaaacgaattatggtcacataaaaactggagagaagccttctcagaaacttctctgtgatgattgcattcaactcacagagttgaaccctcctatggatagagcagtgttgaaactctctttttgtggaatctgcaagtggatatgtggacctctccgaagatgtctttggaaacgggaatatcttcacataaaaactaaacagaagcattctcagaaacttcttggtgatgtttgcattcaaatcccagagttgaaccttcctttgacagttcaggtttgaaacactctttttgtaggatctgcaagtggatatttggaccactctgtggccttcattcgaaacgggtacatcttcgcataaaatctagacagaagcattctcagaaaatactttgtgatgattgagtttaactcacagagctgaacattcctttggatggagcaggtttgagacacactttttgtagaatctacaagtggatatttggacctctctgaggatttcgttggaaacgggataactgcacctaactaaacggaagcattctcagaaactgctttgtgatgattgcattcacctcacagagttgaacattcctattgatagagcagtttggaaacactcttgttgtggaatgtgcaagtggagatttggagcgctttgaggcctatggtagtaaagggaatagcttcatagaaaaactagacagatgcattctcaggaactttttggtgatgtttgtattcaactcccagagttgaactttcctttggaaagagcagctatgaaacactctttttctagaatctgcaagtggacgtttggagggctttgtggtttgtggtggaaaaggaaatatcttcacctaaatactagagagaagcattctcagaagcttctctgtgatgactgcattcaactcacggagttgaacactccttttgagagcgcagttttgaaactctctttctgtggcatctgcaaggggacatgtagacctctttgaagatttcgttggaaacggaatcatcttcacataaaaactatacagaagcagtctcagaatcttctttgtgatgtttcgcattcaaatcccagagttgaactttcctttccaagttcacgtttgaaacactctttttgcaggatctacaagtggatatttggaccactctgtgtccttcgttcgaaacgggtatatcttcacatgacatctagacagaagctttctcagaaaattctttgggatgattgagtggaactcacagagctgaacattccttgcgatgtagcagtttagaaacacactttctgcagaatctgcaagtgcatatttggacctctctgaggaattcgttggaaacgggataatttcagctgactaaacagaagcattctcagaaccttcttcgtcatgtctgcattcaactcacagtgtggaacctttctttgatagttcaggtttgaaacactctttttgtagaaactgcaaggggataattgcacttctttgaggcctaccgtagtaaaggaaataacttcctatagaaagaagacagaagcattctcagaaccctcttcgtgatgtttgcattcaactcacagtgctgaacctttctttgatagttcagctttgaaacactcttcttgtagaaactgcaagtggatatttggtcctctctgaggatttcgttggaaacgggataaaccgcacagaactaaacagaagaattctcagtagccctcttcgtgatgtttgcattcaactcacagtgctgaacctttctttgatagtgcagctttgaaacactctttttgtagaaactgcaagtggatgtttggtcctctctgaggatttcgttggaaacgggataaaccgcacagaactaaaacagaagcattcacagaaaactcttgttgacgactgagtttaactcacagagctgaacattcctttggatggagcagtttcgaaacacactatctgtagaatgtgcaagtggatatttgggcctctctgaggatttcgttggaaacgggataaaccgcacagaactaaacagaagcattctcagaaactactttgtgatgattgcattcaagtcacagagttgaacattccctttgacagagcagtttggaaactctctttgtgtagaatctgcaagtggagatatggaccgctttgaggcctatggtagtaaaggaaatagcttcatataaaagctagacagtagcattctcagaaacttctttgtgatgcttgcattcaactcacagagttgaactttcctttcgagagagaagctttgaaacactctttttccagaatgtgcaagtggacatttggagggctttgaggcctgtggtggaaaaggaattatcttcccgtaaaagctagatagaagcattgtcagaaacttctttgtgatgattgcattcaactcacagagttgaaggttccttttcaaacagcagtttccaatcactctttctgtggaatctgcaagtggatatttgggcctctctgaggatttcgttggaaacgggataaaacgcacagaactaaaacagaagcattctcagaaacttctctgtgatgtttgtgttcaactccccagagtttcacgttgcttttcatagagtagttctgaaacatgcttttcgtagtgtctgcaagtggacatttggagcgctttcaggcctgtggtggaaaacgaattatggtcacataaaaactggagagaagccttctcagaaacttctctgtgatgattgcattcaactcacagagttgaaccctcctatggatagagcagtgttgaaactctctttttgtggaatctgcaagtggatatgtggacctctccgaagatgtctttggaaacgggaatatcttcacataaaaactaaacagaagcattctcagaaacttcttggtgatgtttgcattcaaatcccagagttgaaccttcctttgatagttcaggtttgaaacactctttttgtaggatctgcaagtggctatttggaccactctgtggccttcgttcgaaactggtatatcttcgcataaaatctagacagaagcattctcagaaaatactttgtgatgattgagtttaaatcacagagctgaccattcctttggatggagcaggtttgagacacactttttgtagaatctacaagtggatatttggacctctctgaggatttcgttggaaacgggataactgcacctaactaaacggaagcattctcagaaactgctttgtgatgattgcattcacctcacagagttgaacattcctattgatagagcagtttggaaacactcttgttgtggaatgtgcaagtggagatttggagcgctttgaggcctatggtagtaaagggaatagcttcatagaaaaaattgacagatgcattctcaggaactttttggtgatgtttgtattcaactcccagagttgaactttcctttggaaagagcagctatgaaacactctttttctagaatctgcaagtggacgtttggagggctttgtggtttgtggtggaaaaggaaatatcttcacctaaatactagatagaagcattctcagaagcttctctgtgatgactgcattcaactcacggagttgaacactccttttgagagcgtagttttgaaactctctttctgtggcatctgcaaggggacatgtagacctctttgaagatttcgttggaaacggaatcatcttcacataaaaactatacagaagcagtctcagaatcttctttgtgatgtttgcattcaaatcccagagttgaactttcctttccaagttcacgtttgaaacactctttttgcaggacctacaagtggatatttggaccactctgtgtccttcgttcgaaacgggtatatcttcacatgacatctagacagaagctttctcagaaaattctttgggatgattgagttgagcaaacagagctgaacactccttgcgatgtagcagtttagaaacacactttctgcagaatctgctagtgcatatgtggacctctctgaggaattcgttggaaacgggataatttcagctgactaaacagaagcattctcagaaccttcttcgtgatgtctgcattcaactcacagtgtggaacctttctttgatagttcaggtttgaaacactctttttgtagaaactgcaaggggatcattgcacttctttgaggcctaccgtagtaaaggagataacttcctataaaaagaagacagaagcattctcagaaccctcttcatgatgtttgcattcaactgacggtgctgaacctttctttgatagtccagctttgaaacactctttttgtagaaactgcaagtggatatttggtcctctctgaggatttcgttggaaacgggataaaccgcacagaactaaacagaagcattctcagaaccttcttcgtgatgtttgcattcaactcacagtgttgaacctttctttgatagttcaggttggaaacggtctttctgtagaaactgcaagtagatatttggacctctctgaggatttcgttggaaacgggataaaccgcacagaactaaaacagaagcattcacagaaaactcttggtgacgactgagtttaactcacagagctgaacattcctttggatggagcagtttcgaaacacactatttgtagaatgtgcaagtggatatgtgggcctctctgaggatttcgttggaaacgggataaaccgcacagaactaaacagaagcattctcagaaactactttgtgatgattgcattcaagtcacagagttgaacattccctttgacagagcagtttggaaactctctttgtgtggaatctggaagtggagatatggaccgctttgaggcctatggtagtaaaggaaatagcttcatataaaagctagacagtagcattctcagaaacttctttgtgatgcttgcattcaactcacagagttgaactttcctttcgagagagaagctttgaaacactctttttccagaatctgcaagtggacatttggagggctttgaggcctgtggtggaaaaggaattatcttcccgtaaaaggtagatagaagcattgtcagaaacttctttgtgatgattgcattcaactcacagagttgaaggttccttttcaaagagcagtttccaatcactctttctgtggaatctgcaagtggatatttggacctctttgaagatttcgttggaaacgggagaatcttcacagaaaagctaaacagaagcattctcagaaacttctctgtgatgtttgtgttcaactcccagaatttcagattgcctttcatagagtagttctgaaacatgcttttcgtagtgtctgcaagtggacatttggagcgctttcaggcctgtggtggaaaacgatttatggtcccataaaacctggagagaagccttctcagaaacttctctgtgatgattgcattcaactcacagagttgaaccctcctatggatagagcagtgttgaaactctctttttgtggaatctgcaagtggatatgtggacctctccgaagatgtctttggaaacgggaatatcttcacataaaaactaaacagaagcattctcagaaacttcttggtgatgtttgcattcaaatcccagaggtgaaccttcctttgatagttcaggtttgaaacactctttttgtaggatctgcaagtggctatttagaccactctgtggccttcgttcgaaacgggtatatcttcgcataaaatctagacagaagcattctcagaaaatactttgtgatgattgagttgaactcacagagctgaacattcctttggatggagcaggtttgagacacactttttgtagaatctacaagtggatatttggacctctctgaggatttcattggaaacgggataactgcacctaactaaacggaagcattctcagaaactgctttgtgatgattgcattcacctcacagagttgaacattcctattgatagagcagtttggaaacactcttgttgtggaatgtgcaagtggagatttggagcgctttgaggcctgtggtagtaaagggaatagcttcatagaaaaactagacagatgcattctcaggaaccttttggtgatgtttgtattcaactcccagagttgaactttcctttggaaagagcagctatgaaacactctttttctagaatctgcaagtggacgtttggagggctttgtggtttgtggtggaaaaggaaatatcttcacctaaatactagatagaagcattctcagaagcttctctgtgatgactgcattcaactcacggagttgaacactccttttgagagcgcagttttgaaactctctttctgtggcatctgcaaggggacatgtagacctctttgaagatttcgttggaaacggaatcatcttcacataaaaactatacagaagcagtctcagaatcttctttgtgatgtttgcattcaaatcccagagttgaactttcctttcaaagttcacgtttgaaacactctttttgcaggatctacaagtggatatttggaccactctgtgtccttcgttcgaaacgggtataacttcacacgacatctagacagaagctttctcagaaaattctttgggatgattgagtggaactcacagagctgaacattccttgcgatggagcagtttagaaacacactttctgcagaatctgcaagtgcatatttggacctctctgaggaattcgttggaaacgggataatttcagctgactaaacagaagcattctcagaaccttcttcgtgatgtctgcattcaactcacagtgtggaacctttctttgatagttcaggtttgaaacactctttttgtagaaactgcaaggggataattgcacttctttgaggcctactgtagtaaaggaaataacttcctatagaaagaagacagaagcattctcagaaccctcttcgtgatgtttgcattcaactcacagtgctgaacctttctttgatagttcagctttgaaacactcttcttgtagaaactgcaagtggatatttggtcctctctgaggatttcgttggaaacgggataaaccgcacagaactaaacagaagaattctcagagccctcttcgtgatgtttgcattcaactcacagtgctgaacctttctttgatagtgcagctttgaaacactccttttgtagaaactgcaagtggatatttggtcctctctgaggatttcgttggaaacgggataaaccgcacagcactaaaacagaagcattgtcagaaacttctttgtgatgattgcattcaactcacagagttgaaggttccttttcaaacagcagtttccaatcactctttctgtggaatctgcaagtggatatttgggcctctctgaggatttcgttggaaacgggataaaacccacagaactaaaacagaagcattctcagaaacttctctgtgatgtttgtgttcaactcccagagtttcacattccttctcatagtgtagttctgaaacatgcttttcgtagtgtctgcaagtggacatttggagcgctttcaggcctgtggtggaaaacgaattatggtcacataaaaactggagagaagacttctcagaaacttctccgtgatgattgcattcaactcacagagttgaaccctcctatggatagagcagtgttgaaattctctttttgtggaatctggaagtggatatgtggacctctccgaagatgtctttggaaacgggaatatcttcacataaaaactaaacagaagcattctcagaaacttcttggtgatgtttgcattcaaatcccagagttgaaccttcctttgagagttcaggtttgaaacactctttttgtaggatctgcaagtggatatttggaccactctgtggccttcgttcgaaacgggtacatcttcgcataaaatctagacagaagcattctcagaaaatactttttgatgattgagtttaactcacagagctgaacattcctttggatggagcaggtttgagacacactttttatagaatctacaagtggatatttggacctctctgaggacttcgttggaaacgggataactgcacctaactaaacggaagcattctcagaaactgctttgtgatgattgcattcacctcacagagttgaccattcctattgatagagcagtttggaaacactcttgttgtggaatgtgcaagtgcagatttggagcgctttgaggcctatggtagtaaagggaatagcttcatagaaaaactagacagatgcattctcaggaactttttggtgatgtttgtattcaactcccagagttgaactttcctttggaaagagcagctatgaaacactctttttctagaatctgcaagtggacgtttggagggctttgtggtttgtggtggaaaaggaaatatcttcacctaaatactagatagaagcattctcagaagcttctctgtgatgactgcattcaactcacggagttgaacactccttttgagagcgcagttttgaaactctctttctgtggcatctgcaaggggacatgtagacctctttgaagatttcgttggaaacggaatcatcttcacataaaaactatacagaagcagtctcagaatcttctttgtgatgtttgcattcaaatcccagagttgaactttcctttcaaagttcacgtttgaaacactctttttgcaggatctacaagtggatatttggaccactctgtgtccttcgttcgaaacgggtatatcttcacacgacatctagacagaagctttctcagaaaattctttgggatgattgagttgaactcacagagctgaacattccttgcgatgtagcagtttagaaacacactttctgcagaatctgcaagtgcatatttggacctctctgaggaattcgttggaaacgggataatttcagctgactaaacagaagcattctcagaaccttcttcgtgatgtctgcattcaactcacagtgtggaacctttctttgatagttcaggtttgaaacactctttctgtagaaactgcaaggggataattgcactctttgaggagtaccgtagtaaaggaaataacttcctataaaaagaagacagaagcattcacagaaaactcttggtgacgactgagtttaactcacagagctgaacattcctttggatggagcagtttcgaaacacactatttgtagaatgtgcaagtggatatttaggcctctctgaggatttcgttggaaacgggataaaccgcacagaactaaacagaagcattctcagaaactactttgtgatgattgcattcaagtcacagagttgaacattccctttgacagagcagtttggaaactctctttgtgtagaatctgcaagtggagatatggaccgctttgaggcctatggtagtaaaggaaatagcttcatataaaagctagacagtagcattctcagaaacttctctgtgatgtttgtgttcaactcccagagtttcacgttgcttttcatagagtagttctgaaacatgcttttcgtagtgtctgcaagtggacatttggggagctttgaggcctgtggtggaaaaggaattatcttcccgtaagagctagatagaagccttctcagaaacttctctgtgatgattgcattcaactcacagagttgaaccctcctatggatagagcagtgttgaaactctctttttgtggaatctgcaagtggatatgtggacctctccgaagatgtctttggaaacgggaatatcttcacataaaaactaaacagaagcattctcagaaacttcttggtgatgtttgcattcaaatcccagagttgaaccttcctttgatagttcagctttgaaacactctttttgtaggatctgcaagtggctatttggaccactctgtggccttcgttcgaaacgggtatatcttcgcataaaatctagacagaggcattctcagaaaatactttgtgatgattgagtttaaatcacagagctgaacattcctttggatggagcaggtttgagacacactttttgtagaatctacaagtggatatttggacctctctgaggatttcgttggaaacgggataactgcacctaactaaacggaagcattctcagaaactgctttgtgatgattgcattcacctcacagagttgaacattcctattgatagagcagtttggaaacactcttgttgtggaatgtgcaagtggagatttggagcgctttgaggcctgtggtagtaaagggaatagcttcatagaaaaactagacagatgcattctcaggaactttttggtgatgtttgtattcaactcccagagttgaactttcctttggaaagagcagctatgaaacactctttttctagaatctgcaagtggacgtttggagggctttgtggtttgtggtggaaaaggaaatatcttcacctaaatactagatagaagcattctcagaagcttctctgtgatgactgcattcaactcacggagttgaacactccttttgagagcgcagttttgaaactctctttctgtggcatctgcaaggggacatgtagacctctttgaagatttcgttggaaacggaatcatcttcacataaaaactatacagaagcagtctcagaatcttctttgtgatgtttgcattcaaatcccagagttgaactttcctttcaaagttcacgtttgaaacactctttttgcaggatctacaagtggatatttggaccactctgtgtccttcgttcgaaacgggtatatcttcacacgacatctagacagaagctttctcagaaaattctttgggatgattgagttgaactcacagagctgagcattccttgcgatgtagcagtttagaaacacactttctgcagaatctgcaagtgcatatttggacctctgtgaggaattcgttggaaacgggataatttcagctgactaaacagaagcattctcagaaccttcttcgtgatgtctgcattcaactcacagtgtggaacctttctttgatagttcaggtttgaaacactctttttgtagaaactgcaaggggataattgcactctttgaggagtaccgtagtaaaggaaataactttctctaaaaagaagacagaagcattctcagaaccctcttcgtgatgtttgcattcaactcacagtgctgaacctttctttgatagttcagctttgaaacactcttcttgtagaaactgcaagtggatatttggtcctttctgaggatttcgttggaaacgggataaaccgcacagaactaaacagaagcattctcagaaccttcttcgtgatgtttgcattcaactcacagtgttgaacctttctttgatagttcaggtttgaaacggtctttctgtagaaactgcaagtagatatttggacctctctgaggatttcgttggaaacgggataacccgcacagaactaaaacagaagcattcagagaaaactcttggtgacgactgagtttaactcacagagctgaacatccctttggatggagcagtttcgaaacacactatttgtagaatgtgcaagtggatatttgggcctctctgaggatttcgttggaaacgggataaaccgcacagaactaaacagaagcattctcagaaactactttttgatgattgcattcaagtcacagagttgaacattccctttgacagagcagtttggaaactctctttgtgtagaatctgcaagtggagatatagaccgctttgaggactatggtagtaaaggaaatagcttcatataaaagctagacagtagcattctcagaaacttctttgtgatgcttgcattcaactcacagagttgaactttcctttcgagagagaagctttgaaacactctttttccagaatctgcaagtggacatttggagggctttgaggcctgtggtggaaaaggaattatcttcccgtaaaagctagatagaagcattgtcagaaacttctttgtgatgattgcattcaactcacagagttgaaggttccttttcaaagagcagtttccaatcactctttctgtggaatctgcaagtggatatttggacctattttgaagatttcgttggaaacgggagaatcttcacaggaaagctaaacagaagcattctcagaaacttctctgtgatgtttgtgttcaactcccagagtttcacattgcttttcatagagtagttctgaaacatgcttttcgtagtgtctacaagtggacatttggagcgctttcaggcctgtggtggaaaacgaattatggtcacataaaaactggagagaagccttctcagaaacttctctgtgatgattgcattcaactcacagagttgaaccctcctatggatagagcagtgttgaaactctctttttgtggaatctgcaagtggatatgtggacctctccgaagatgtcctttggaaacgggaatatcttcacataaaaactaaacagaagcattctcagaaacttcttggtgatgtttgcattcaaatcccagagtcgaaccttcctttgatagttcaggtttgaaacactctttttgtaggatctgcaagtggatatttggaccactctgtggccttcgttcgaaacgggtatatcttcgcataaaatctagacagaagcattctcagaaaatactttgtgatgattgagtttaattcacagagctgaacattcctttggatggagcaggtttgagacacactttttgtagaatctacaagtggatatttggatctttctgaggatttcattggaaacgggataactgcacctaactaaacggaagcattctcagcaaactgctttgtgatgattgcattcacctcacagagttgaacattcctattgatagagcagtttggaaacactcttgttgtggaatgtgcaagtggagatttggagcgctttgaggcctatggtagtaaagggaatagcttcatagaaaaactagacagatgcattctcaggaactttttggtgatgtttgtattcaactcccagagttgaactttcctttggaaagagcagctatgaaacactctttttctagaatctgcaagtggacgtttggagggctttgtggtttgtggtggaaaaggaaatatcttcacctaaatactagatagaagcattctcagaagcttctctgtgatgactgctttcaactcacggagttgaacactccttttgagagcgcagttttgaaactctctttctgtggcatccgcaaggggacatgtggacctctttgaagatttcgttggaaacggaatcatcttcacataaaaactatacagaagcagtctcagaatcttctttgtgatgtttgcattcaaatcccagagttgaactttcctttcaaagttcacgtttgaaacactctttttgcaggatctacaagtggatatttggaccactctgtgtccttcgttcgaaacgggtatatcttcacacgacatctagacagaagctttctcagaaaattctttgggatgattgagtggaactcacagagctgaacattccttgcgatgtagcagtttagaaacacactttctgcagaatctgcaagtgcatatttggacctctctgaggaattcgttggaaacgggataatttcagctgactaaacagaagcattctcagaaccttcttcgtgatgtctgcattcaactcacagtgtggaacctttctttgatagttcaggtgtgaaacactctttttgtagaaactgcaaggggataattgcacttctttgaggcctaccgtagtaaaggaaataacttcctatagaaagaagacagaagcattctcagaaccctcttcgtgatgtttgcattcaactcacagtgctgaacctttctttgatagttcagctttgaaacactcttcttgtagaaactgcaagtggatatttggtcctctctgaggatttcgttggaaacgggataaaccgcacagaactaaacagaagcattctcagagccctcttcgtgatgtttgcattcaactcacagtgctgaacctttctttgatagtgcagctttgaaacactctttttgtagaaactgcaagtggatatttggtcctctctgaggatttcgttggaaacgggataagccgcacagaactaaaacagaagcattgtcagaaacttctttgtgatgattgcattcaactcacagagttgaaggttccttttcaaacagcagtttccaatcactctttctgtggaatctgcaagtggatatttgggcctctctgaggatttcgttggaaacgggataaaacgcacagaactaaaacagaagcattctcagaaacttctctgtgatgtttgtgttcaactccccagagtttcacgttgcttttcatagagtagttctgaaacatgcttttcgtagtgtctgcaagtggacatttggagcgctttcaggcctgtggtggaaaacgaattatggtcacataaaaactggagagaagccttctcagaaacttctctgtgatgattgcattcaactcacagagttgaaccctcctatggatagagcagtgttgaaactctctttttgtggaatctgcaagtggatatgtggacctctccgaagatgtctttggaaacgggaatatcttcacataaaaactaaacagaagcattctcagaaacttcttggtgatgtttgctttcaaatcccagagttgaaccttcctttgatagtttaggtttgaaacactctttttgtaggatctgcaagtggatatttggaccactctgtggccttcgttcgaaacgggtacatcttcgcataaaatctagacagaagcattctcagaaaatactttgtgatgattgagttgaactcacagagctgaacattcctttggatggagcaggtttcagacacactttttgtagaatctacaagtgcatatttggacctctctgaggatttcgttggaaacggggtaactgcacctaactaaacggaagcattctcagaaactgctttgtgatgattgcattcacctcacagagttgaacattcctattgatagagcagtttggaaacactcttgttgtggaatgtgcaagtggagatttggagcgctttgaggcctatggtagtaaagggaatagcttcatagaaaaactagacagatgcattctcaggaactttttggtgatgtttgtattcaactcccagagttgaactttcctttggaaagagcagctatgaaacactctttttctagaatctgcaagtggacgtttggagggctttgtggtttgtggtggaaaaggaaatatcttcacctaaatactagagagaagcattctcagaagcttctctgtgatgactgcattcaactcacggagttgaacactccttttgagagcgcagttttgaaactctctttctgtggcatctgcaaggggacatgtagacctctttgaagatttcattggaaacggaatcatcttcacataaaaactatacagaagcagtctcagaatcttctttgtgatgtttgcattcaaatcccagaattgaactttactttaaagttcacgtttgaaacactctttttgcaggatctacaagtggatatttggaccactctgtgtccttcgttcgaaacgggtatatcttcacatgacatctagacagaagctttctcagaaaattctttgggatgattgagtggaactcacagagctgaacattccttgcgatgtagcagtttagaaacacactttctgcagaatctgcaagtgcatatttggacctctctgaggaattcgttggaaacgggataatttcagctgactaaacagaagcattctcagaaccttcttcgtgatgtctgcattcaactcacagtgtggaaactttctttgatagttcaggtttgaaacactctttttgtagaaactgcaaggggataattgcacttctttgaggcctaccgtagtaaaggaaataacttcctataaaaagaagacagaagcattctcagaaccctcttcgtgatgtttgcattcaactcacagtgctgaacctttctttgatagttcagctttgaaacactcttcttgtagaaactgcaagtggatatttggtcctctctgaggatttcgttggaaacgggataaaccgcacagaactaaacagaagaattctcagagccctcttcgtgatgtttgcattcaactcacagtgctgaacctttctttgatagtgcagctttgaaacactctttttgtagaaactgcaagtggatgtttggtcctctctgaggatttcgttggaaacgggataaaccgcacagaactaaaacagaagcattgtcagaaacttctttgtgatgattgcattcaactcacagagttgaaggttccttttcaaacagcagtttccaatcactctttctgtggaatctgcaagtggatatttgggcctctctgaggatttcgttggaaacgggataaaacgcacagaactaaaacagaagcattctcagaaacttctctgtgatgtttgtgttcaactcccagagtttcacgttgcttttcatagagtagttctgaaacatgcttttcgtagtgtctgcaagtggacatttggagcgctttcaggcctgtggtggaaaacgaattatggtcacataaaaactggagagaagccttctcagaaacttctctgtgatgattgcattcaactcacagagttgaaccctcctatggatagagcagtgttgaaactctctttttgtggaatctgcaggtggatatgtgcacctctctgaagatgtctttggaaacgggaatatcttcacataaaaactaaacagaagcattctcagaaacttcttggtgatgtttgcattcaaatcccagagttgaaccttcctttgatagttcaggtttgaaacactctttttgtaggatctgcaagtggctatttggaccactctgtggccttcgttcgaaacgggtatatcttcgcataaaatctagacagaagcattctcagaaaatactttgtgatgattgagttgaactcacagagctgaacattcctttggatggagcaggtttgagacacactttttgtagaatctacaagtggatatttggacctctctgaggatttcgttggaaacgggataactgcacctaactaaacggaagcattctcagaaactgctttgtgatgattgcattcacctcacagagttgaacattcctattgatagagcagtttggaaacactcttgttgtggaatgtgcaagtggagatttggagcgctttgaggcctatggtagtaaagggaatagcttcatagaaaaactagacagatgcattctcaggaactttttggtgatgtttgtattcaactcccagagttgagctttcctttggaaagagcagctatgaaacactctttttctagaatctgcaagtggacgtttggagtgctttgtggattgtggtggaaaaggaaatatcttcacctaaatactagagagaagcattctcagaagcttctctgtgatgactgcattcaactcacggagttgaacactccttttgagagcgcagttttgaaactctctttctgtggcatctgcaaggggacatgtagacctctttgaagatttcgttggaaacggaatcatcttcacataaaatctatacagaagcagtctcagaatcttctttgtgatgtttgcattcaaatcccagagttgaactttcctttcaaagttcacgtttgaaacactctttttgcaggatctacaagtggatatttggaccactctgtgtccttcgttcggaacgggtatatcttcacatgacacctagacagaagctttctcagaaaattctttgggatgattgagtggaactcacagagctgaacattccttgcgatgtagcagtttagaaacacactttctgcagaatctgcaagtgcatatgtggacctctctgaggaattcgttggaaacgggataatttcagctgactaaacagaagcattctcagaaccttcttcgtgatgtgtgcattcaactcacagtgtggaacctttctttgatagttcaggtttgaaacactctttttgtagaaactgcaaggggataattgcacttctttgaggcctaccgtagtaaaggaaataacttcctatagaaagaagacagaagcattctcagaaccctcttcgtgatgtttgcattcaactcacagtgctgaacctttctttgatagttcagctttgaaacactctttttgtagaaactgcaagtggatatttggtcctctctgagcatttcgttggaaacgggataaactgcacagaactaaacagaagcattctcagaaccttcttcgtgatgtttgcattcaactcacagtgttgaacctttctttgatagttcaggtttgaaacggtctttctgtagaaactgcaagtagatatttggacctctctgaggatttcgttggaaacgggataacccgcacagaactaaaacagaagcattcacagaaaactcttggtgacgactgagtttaactcacagagctgaacattcctttggatggagcagtttcgaaacacactatttgtagaatgtgcaagtggatatttaggcctctctgaggatttcgttggaaacgggataaaccgcacagaactaaacagaagcattctcagaaactactttgtgatgattgcattcaagtcacagagttgaacattccctttgacagagcagtttggaaactctctttgtgtagaatctgcaagtggagatatggaccgctttgaggcctatggtagtaaaggaaatagcttcatataaaagctagacagtagcattctcagaaacttctttgtgatgcttgcattcaactcacagagttgaactttcctttcgagagagaagctttgaaacactcttttccagaatctgcaagtggacatttggagggcattgaggcctgtggtggaaaaggaattatcttcccgtaaaagctagacagaagcattgtcagaaacttctttgtgatgattgcattcaactcacagagttgaaggttccttttcaaagagcagtttccaatcactctttctgtggaatctgcaagtggatatttggacctctttgaagatttcgttggaaacgggagaatcttcacagaaaagctaaacagaagcattctcagaaacttctctgtgatgtttggtgttcaactcccagagtttcacgttgcttttcatagagtagttctgaaacatgcttttcgtagtgtctgcaagtggacatttggagcgctttcaggcctgtggtggaaaacgaattatggtcacataaaaactggagagaagccttctcagaaacttctctgtgatgattgcattcaactcacagagttgaaccctcctatggatagagcagtgttgaaactctctttttgtggaatctgcaagtggatatgtggacctctccgaagatgtctttggaaacgggaatatcttcacataaaaactaaacagaagcattctcagaaatttcttggtgatgtttgcatacaaatcccagagttgaaccttcctttgatagttcaggtttgaaacactctttttgtaggatctgcaagtggctatttggactactctgaggccttcgttcgaaacgggtatatcttcgcataaaatctagacagaagcattctcagaaaatactttgtgatgattgagttgaactcacagagctgaacattcctttggatggagcaggtttgagacacactttttgtagaatctacaagtggatatttggacctctctgaggatttcgttggaaacgggataactgcacctaactaaacggaagcattctcagaaactgctttgtgatgattgcattcacctcacagagttgaacattcctattgatagagcagtttggaaacactcttgttgtggaatgtgcaagtggagatttggagcgctttgaggcctgtggtagtaaagggaatagcttcatagaaaaactagacagatgcattctcaggaacttctttttggtgatgtttgtattcaactcccagagttgaactttcctttggaaagagcagctatgaaacactctttttctagaatctgcaagtggacgtttggagggctttgtggtttgtggtggaaaaggaaatatcttcacctaaatactagacagaagcattctcagaagcttctctgtgatgactgcattcaactcacggagttgaacactccttttgagagcgcagttttgaaactctctttctgtggcatctgcaaggggacatgtagacctctttgaagatttcgttggaaacggaatcatcttcacataaaaactatacagaagcagtctcagaatcttctttgtgatgtttgcattcaaatcccagagttgaactttcctttcaaagttcacgtttgaaacactctttttgcaggatctacaagtggatatttggaccactctgtgtccttcgttcgaaacgggtatatcttcacatgacatctagacagaagctttctcagaaaattctttgggatgattgagttgaactcacagagctgaacattccttgcgatgtagcagtttagaaacacactttctgcagaatctgcaagtgcatatttggacctctcagagtaattcgttggaaacgggataatttcagctgactaaacagaagcattctcagaaccttcttcgtgatgtctgcattcaactcacagtgtggaacctttctttgatagttcaggtttgaaacactctttttgtagaaactgcaaggggataattacacttctttgaggcctaccgtagtaaaggaaataacttcctataaaaagaagacagaagcattctcagaaccctcttcgtgatgtttgcattcaactcacagtgctgaacctttctttgatagttcagctttgaaacactcttcttgtagaaactgcaagtggatatttggtcctctctgaggatttcgttggaaacgggataaaccgcacagaactaaacagaagaattctcagagccctcttcgtggtgtttgcattcaactcacagtgctgaacctttctttgatagtgcagctttgaaacactatttttgtagaaactgcaagtggatatttggtcctctctgaggatttcgttggaaacgggataaaccgcacagaactaaaacagaagcattcacagaaaactcttggtgacgactgagtttaactcacagagctgaacattcctttggatggagcagtttcgaaacacactatttgtagaatctgcaagtggatatttgggcctctctgaggatttcgttggaaacgggataaaacgcacagaactaaaacagaagcattctcagaaactactttgtgatgattgcattcaagtcacagagttgaacattccctttgacagagcagtttggaaactctctttgtgtagaatctgcaagtggagatatggaccgctttgaggtctatggtagtaaaggaaagagcttcatataaaagctagacagtagcattctcagaaacttctttgtgatgcttgcattcaactcacagagttgaactttcctttcgagagagaagctttgaaacactctttttccagaatgtgcaagtggacatttggggagctttgaggcctgtggtggaaaaggaattatcttcccgtaaaagctagatagaagcattgtcagaaacttctttgtgatgattgcattcaactcacagagttgaaggttccttttcaaacagcagtttccaaacactctttctgtggaatctgcaagtggatatttggacctctttgaagatttcgttggaaacgttataaccttcacagaaaagctaaacagaagcattctcagaaacttctctgtgatgtttgtgttcaactcccagagtttcacgttgcttttcatagagtagttctgaaacatgcttttcgtagtgtctgcaagtggacatttggagcgctttcaggcctgtggtggaaaacgaattatggtcacataaaaactggagagaagccttctcagaaacttctctgtgatgattgcattcaactcacagagttgaaccctcctatggatagagcagtgttgaaactctctttttgtggaatctgcaagtggatatgtggacctctccgaagatgtctttggaaacgggaatatcttcacataaaaactaaacagaagcattctcagaaacttcttggtgatgttttcattcaaatcccagagttgaaccttcctttgatagttcaggtttgaaacactctttttgtaggatctgcaagtggctatttggaccactctgtggccttcgttcgaaacgggtatatcttcgcataaaatctagacagaagcattctcagaaaatactttgtgatgattgagtttaaatcacagagctgaccattcctctggatggagcaggtttgagacacactttttgtagaatctacaagtggatatttggacctctctgaggatttcgttggaaacgggataactgcacctaactaaacggaagcattctcagaaactgctttgtgatgattgcattcacctcacagagttgaacattcctattgatagagcagtttggaaacactcttgttgtggaatgtgcaagtggagatttggagcgctttgaggcctatggtagtaaagggaatagcttcatagaaaaactagacagatgcattctcaggaactttttggtgatgtttgtattcaactcccagagttgaactttcctttagaaagagcagctatgaaacactctttttctagaatctgcaagtggacgtttggagggctttgtggtttgtggtggaaaaggaaatatcttcacctaaatactagatagaagcattctcagaagcttctctgtgatgactgcattcaactcacggagttgaacactccttttgagagcgcagttttgaaactctctttctgtggcatctgcaaggggacatgtagacctctttgaagatttcgttggaaacggaatcatcttcacataaaaactatacagaagcagtctcagaatcttctttgtgatgtttgcattcaaatcccagagttgaactttcctttcaaagttcacgtttgaaacactctttttgcaggatctacaagtggatatttggaccactctgtgtccttcgttcgaaacgggtatatcttcacatgacatctagacagaagctttctcagaaaattgtttgggatgattgatttgaactcacagagctgagcattccttgtgatgtagcagtttagaaacacactttctgcagaatctgcaagtgcatatgtggacctctctgaggaattcgttggaaacgggataatttcagctgactaaacagaagcattctcagaaccttcttcgtgatgtctgcattcaactcacagtgtggaacctttctttgatagttcaggtttgaaacactctttttgtagaaactgcaaggggataattacacttctttgaggcctaccgtagtaaaggaaataacttcctatagaaagaagacagaagcattctcagaaccctcttcgtgatgtttgcattcaactcacagtgctgaacctttctttgatagttcagctttgaaacactcttcttgtagaaactgcaagtggatatttggtcctctctgaggatttcgttggaaacgggataaaccgcacagaactaaacagaagaattctcagagccctcttcgtgatgtttgcattcaactcacagtgctgaacctttctttgatagtgcaactttgaaacactctttttgtagaaactgcaagtggatatttggtcctctctgaggatttcgttggaaacgggataaaccgcacagaactaaaacagaagcattcacagaaaactcttggtgacgactgagtttaactcacagagctgaacattcctttggatggagcagtttcgaaacacactatttgtagaatctgcaagtggatatttgggcctctctgaggatttcgttggaaacgggataaaacgcacagaactaaaacagaagcattctcagaaactactttgtgatgattgcattcaagtcacagagttgaacattccctttgacagagcagtttggaaactctctttgtgtagaatctgcaagtggagatatggaccgctttgaggcctatggtagtaaaggaaatagcttcatataaaagctagacagtagcattctcagaaacttctttgtgatgcttgcattcaactcacagagttgaactttcctttcgagagagaagctttgaaacactctttttccagaatgtgcaagtggacatttggggagctttgaggcctggggtggaaaaggaattatcttcccgtaaaagctagatagaagcattgtcagaaacttctttgtgatgattgcattcaactcacagagttgaaggttccttttcaaacagcagtttccaatcactctttctgtggaatctgcaagtggatatttgggcctctctgaggatttcgttggaaacgggataaaacgcacagaactaaaacagaagcattctcagaaacttctctgtgatgtttgtgttcaactcccagagtttcacattgcttttcatagagtagttctgaaacatgcttttcgtagtgtctgcaagtggacatttggagcgctttcaggcctgtggtggaaaacgaattatggtcccataaaaactggagagaagccttctcagaaacttctctgtgatgattgcattcaactcacagagttgaaccctcctatggatagagcattgttgaaactctctttttgtggaatctgcaagtggatatgtggacctctccgaagatgtctttggaaacgggaatatcttcacataaaaactaaacagaagcattctcagaaacttcttggtgatgtttgcattcaaatcccagagttgaaccttcctttgatagttcaggtttgaaacactctttctgtaggatctgcaagtggctatttggaccactctgtggccttcgttcgaaacgggtatatcttcgcataaaatctagacagaagcattctcagaaaatactttgtgatgattgagtttaaatcacagagctgaccattcctttggatggagcaggtttgagacacactttttgtagaatctacaagtggatatttggacctctctgaggatttcgttggaaacgggataactgcacctaactaaacggaagcattctcagaaactgctttgtgatgattgcattcacctcacagagttgaacattcctattgatagagcagtttggaaacactcttgttgtggaatgtgcaagtggagatttggagcgctttgaggcctatggtagtaaagggaatagcttcatagaaaaactagacagatgcattctcaggaactttttggtgatgtttgtattcaactcccagagttgaactttcctttggaaagagcagctatgaaacactctttttctagaatctgcaagtggacgtttggagggctttgtggtttgtggtggaaaaggaaatatcttcacctaaatactagatagaagcattctcagaagcttctctgtgatgactgcattcaactcacggagttgaacactccttttgagagcgcagttttgaaactctttctgtggcatctgcaaggggacatgtagacctctttgaagatttcgttggaaacggaatcatcttcacataaaaactatacagaagcagtctcagaatcttctttgtgatgtttgcattcaaatcccagagttgaactttcctttcaaagttcacgtttgaaacactctttttgcaggatctacaagtggatatttggaccactctgtgtccttcgttcgaaacgggtatatcttcacacgacatctagacagaagctttctcagaaaattctttgggatgattgagtggaactcacagagctgaacattccttgcgatgtagcagtttagaaacacactttctgcagaatctgcaagtgcatatttggacctctctgaggaattcgttggaaacgggataatttcagctgactaaacagaagcagtctcagaaccttcttcgtgatgtctgcattcaactcacagtgtggaacctttctttgatagttcaggtttgaaacactctttttgtagaaactgcaaggggataattaccctctttgaggagtaccgtagtaaaggaaataacttcctatagaaagaagacagaagcattctcagaaccctcttcgtgatgtttgcattcaactcacagtgctgaacctttctttgatagtgcagctttgaaacactctttttgtagaaactgcaagtggatatttggtcctgtctgaggatttcgttggaaacgggataaaacgcacagaactaaacagaagcattctcagaaccttcttcgtgatgtttgcattcaactcacagtgttgaacctttctttgatagttcaggtttgaaacggtctttctgtagaaactgcaagtagatatttggacctctctgaggatttcgttggaaacgggataacccgcacagaactaaaacagaagcattcacagaaaactcttggtgacgactgagtttaactcacagagctgaacattcctttggatggagcagtttcgaaacacactatttgtagaatctgcaagtggatatttgggcctctctgaggatttcgttggaaacgggataaaacgcacagaactaaaacagaagcattctcagaaactactttgtgattattgcattcaagtcacagagttgaacattccctttgacagagcagtttggaaactctctttgtgtagaatctgcaagtggagatatggaccgctttgaggcctatggtagtaaaggaaatagcttcatataaaacctagacagtagcattctcagaaacttctttgtgatgcttgcattcaactcacagagttgaactttcctttcgagagagaagctttgaaacactctttttccagaatgtgcaagtggacatttggggagctttgaggcctgtggtggaaaaggaattatcttcccgtaaaagctagatagaagcattgtcagaaacttctttgtgatgattgcattcaactcacagagttgaaggttccttttcaaacagcagtttccaatcactctttctgtggaatctgcaagtggatatttgggcctctctgaggatttcgttggaaacgggataaaacgcacagaactaaaacagaagcattctcagaaacttctctgtgatgtttgtgttcaactcccagagtttcacattgcttttcatagagtagttctgaaacatgcttttcgtagtgtctacaagtggacatttggagcgctttcaggcctgtggtggaaaacgaattatggtcacataaaaactggagagaagccttctcagaaacttctctgtgatgattgcattcaactcacagagttgaaccctcctatggatagagcagtgttgaaactctctttttgtggaacctgcaagtggatatgtggacctctccgaagatgtctttggaaacgggaatatcttcacataaaaactaaacagaagcattctcagaaacttcttggtgatgtttgcattcaaatcccagagttgaaccttcctttgatagttcaggtttgaaacactctttttgtaggatctgcaagtggatatttggaccactctgtggccttcgttcgaaacgggtacatcttcgcataaaatctagacagaagcattctcagaaaatactttgtgatgattgagtttaactcacagagctgaacattcctttggatggagcaggtttgagacacactttttgtagaatctacaagtggatatttcgacctctctgaggatttcgttggaaacgggataactgcacctaactaagcggaagcattctcagaaactgctttgtgatgattgcattcacctcacagagttgaccattcctattgatagagcagtttggaaaccctcttgttgtggaatgtgcaagtggagatttggagcgctttgaggcctatggtagtaaaggaaatagcttcatagaaaaactagacagatgcattctcaggaaccttttggtgatgtttgtattcaactcccagagttgaactttcctttggaaagagcagctatgaaacactctttttctagaatctgcaagtggacgtttggagggctttgtggtttgtggtggaaaaggaaatatcttcacctaaatactagatagaagcattctcagaagcttctctgtgatgactgcattcaactcacggagttgaacactccttttgagagcgcagttttgaaactctctttctgtggcatctgcaaggggacatgtagacctctttgaagatttcgttggaaacggaatcatcttcacataaaaactatacagaagcagtctcagaatcttctttgtgatgtttgcattcaaatcccagaattgaactttactttaaagttcacgtttgaaacactctttttgcaggatctacaagtggatatttggaccactctgtgtccttcgttcgaaacgggtatatcttcacatgacatctagacagaagctttctcagaaaattctttgggatgattgagtggaactcacagagctgaacattccttgcgatggagcagtttagaaacacactttctgcagaatctgcaagtgcatatttggacctctctgaggaattcgttggaaacgggataatttcagctgactaaacagaagcattctcagaaccttcttcgtgatgtctgcattcaactcacagtgtggaacctttctttgatagttcaggtttgaaacactctttttgtagaaactgcaaggggataattgcacttctttgaggcctaccgtagtaaaggaaataacttcctatagaaagaagacagaagcattctcagaaccctcttcgtgatgtttgcattcaactcacagtgctgaacctttctttgatagttcagctttgaaacactcttcttgtagaaactgcaagtggatatttggtcctctctgaggatttcgttggaaacgggataaaccgcacagaactaaacagaagaattctcagagccctcttcgtgatgtttgcattcaactcacagtgctgaacctttctttgatagtgcagctttgaaacactctttttgtagaaactgcaagtggatgtttggtcctctctgaggatttcgttggaaacgggataaaccgcacagaactaaaacagaagcattgtcagaaacttctttgtgatgattgcattcaactcacagagttgaaggttccttttcaaacagcagtttccaatcactctttctgtggaatctgcaagtggatatttgggcctctctgaggatttcgttggaaacgggataaaacgcacagaactaaaacagaagcattctcagaaacttctctgtgatgtttgtgttcaactccccagagtttcacgttgcttttcatagagtagttctgaaacatgcttttcgtagtgtctgcaagtggacatttggagcgctttcaggcctgtggtggaaaacgaattatggtcacataaaaactggagagaagccttctcagaaacttctctgtgatgattgcattcaactcacagagttgaaccctcctatggatagagcagtgttgaaactctctttttgtggaatctgcaagtggatatgtggacctctccgaagatgtctttggaaacgggaatatcttcacataaaaactaaacagaagcattctcagaaacttcttggtgatgtttgcattcaaatcccaggagttgaaccttcctttgatagttcaggtttgaaacactctttttgtaggatctgcaagtggctatttggaccactctgtggccttcgttcgaaacgggtatatcttcgcataaaatctagacagaagcattctcagaaaatactttgtgatgattgagtttaactcacagagctgaacattcctttggatggagcaggtttgagacacactttttgtagaatctacaagtggatatttggacctctctgaggatttcgttggaaacgcgataactgctcctaactaaacggaagcattctcagaaactgctttgtgatgattgcattcacctcacagagttgaacattcctattgatagagcagtttggaaacactcttgttgtggaatgtgcaagtggagatttggagcgctttgaggcctatggtagtaaagggaatagcttcatagaaaaactagacagatgcattctcaggaactttttggtgatgtttgtattcaactcccagagttgaactttccctttggaaagagcagctatgaaacactctttttctagaatctgcaagtggacgtttggagggctttgtggtttgtggtggaaaaggaaatatcttcacctaaatactagatagaagcattctcagaagcttctctgtgatgactgcattcaactcacggagttgaacactccttttgagagcgcagttttgaaactctctttctgtggcatctgcaaggggacatgtagacctctttgaagatttcgttggaaacggaatcatcttcacataaaaactatacagaagcagtctcagaatcttctttgtgatgtttgcattcaaatcccagagttgaactttcctttcaaagttcacgtttgaaacactctttttgcaggatctacaagtggatatttggaccactctgtgtccttcgttcgaaacgggtatatcttcacatgacatctacacagaagctttctcagaaaattctttgggatgattgagtggaactcacagagctgaacattccttgcgatgtagcagtttagaaacacactttctgcagaatctgcaagtgcatatttggacctctctgaggaattcgttggaaacgggataatttcagctgactaaacagaagcattctcagaaccttcttcgtgatgtctgcattcaactcacagtgtggaacctttctttgatagttcaggtttgaaacactctttttgtagaaactgcaaggggataatggcacttctttgaggcctaccgtagtaaaggaaataacttcctatagaaagaagacagaagcattctcagaaccctcttcgtgatgtttgcattcaactcacagtgctgaacctttctttgatagttcagctttgaaacactcttcttgtagaaactgcaagtggatatttggtcctctctgaggatttcgttggaaacgggataaaccgcacagaactaaacagaagcattctcagagccctcttcgtgatgtttgcattcaactcacagtgctgaacctttctttgatagtgcagctttgaaacactctttttgtagaaactgcaagtggatatttggtcctctctgaggatttcgttggaaacgggataaaccgcacagaactaaaacagaagcattcacagaaaactcttggtgacgactgagtttaactcacagagctgaacattcctttggatggagcagtttcgaaacacactatttgtagaatctgcaagtggatatttgggcctctctgaggatttcgttggaaacgggataaaacgcacagaactaaaacagaagcattctcagaaactactttgtgatgattgcattcaagtcacagagttgaacattccctttgacagagcagtttggaaactctctttgtgtagaatctgcaagtggagatatggaccgctttgaggcctatggtagtaaaggaaatagcttcatataaaagctagacagtagcattctcagaaacttctttgtgatgcttgcattcaactcacagagttgaactttcctttcgagagagaagctttgaaacactctttttccagaatgtgcaagtggacatttggggagctttgaggcctgtggtggaaaaggaattatcttcccgtaaaagctagatagaagcattgtcagaaacttctttgtgatgattgcattcaactcacagagttgaaggttccttttccaacagcagtttccaaacactctttctgtggaatctgcaagtggatatttggacctctttgaagatttcgttggaaaagggataatcttcacagaaaagctaaacagaagcattctcagaaacttctctgtgatgtttgtgttcaactcccagagtgtcacattgcttctcatagagtagttctgaaacatgcttttcgtattgtctgcaaggggacatttggagcgctttcaggcctgtggtggaaaacgaattatggtcacataaaaactggacagaaggcttctcagaaacttctctgtgatgattgcattcaactcacagagttgaaccctcctatggatagagcagtgttgaaactctctttttgtggaatctgcaagtggatatgtggacctctccgaagatgtctttggaaacgggaatatcttcacataaaaactaaacagaagcattctcagaaacttcttggtgatgtttgcattcaaatcccagagttgaaccttcctttgatagttcaggtttgaaacactctttctgtaggatctgcaagtggctatttggaccactctgtggccttcgttcaaaacgggtatatcttcgcataaaatctagacagaagcattctcagaaaatactttgtgatgattgagtttaaatcacagagctgaccattcctttggatggagcaggtttgagacacactttttgtagaatctacaagtggatatttggacctctctgaggatttcgttggaaacgggataactgcacctaactaaacggaagcattctcagaaactgctttgtgatgattgcattcacctcacagagttgaacattcctattgatagagcagtttggaaacactcttgttgtggaatgtgcaagtggagatttggagcgctttgaggcctatggtagtaaagggaatagcttcatagaaaaactagacagatgcattctcaggaaccttttggtgatgtttgtattcaactcccagagttgaactttcctttggaaagagcagctatgaaacactctttttctagaatctgcaagtggacgtttggagggctttgtggtttgtggtggaaaaggaaatatcttcacctaaatactagatagaagcattctcagaagcttctctgtgatgactgcattcaactcacggagttgaacactccttttgagagcgcagttttgaaactctctttctgtggcatctgcaaggggacatgtagacctctttgaagatttcgttggaaacggaatcatcttcacataaaaactatacagaagcagtctcagaatcttctttgtgatgtttcgcattcaaatcccagagttgaactttcctttccaagttcacgtttgaaacactctttttgcaggatctacaagtggatatttggaccactctgtgtccttcgttcgaaacgggtatatcttcacatgacatctagacagaagctttctcagaaaattctttgggatgattgagtggaactcacagagctgaacattccttgcgatgtagcagtttagaaacacactttctgcagaatctgcaagtgcatatttggacctctctgaggaattcgttggaaacgggataatttcagctgactaaacagaagcattctcagaaccttcttcgtgatgtctgcattcaactcacagtgtggaaccctttctttgatagttcaggtttgaaacactctttttgtagaaactgcaaggggataattgcacttctttgaggcctaccgtagtaaaggaaataacttcctatagaaagaagacagaagcattcacagaaaactcttggtgacgactgagtttaactcacagagctgaacattcctttggatggagcagtttcgaaacacactatttgtagaatctgcaagtggatatttgggcctctctgaggatttcgttggaaacgggataaaacgcacagaactaaacagaagcattctcagaaactactttgtgatgattgcattcaagtcacagagttgaacattccctttgacagagcagtttggaaactctctttgtgtagaatctgcaagtggagatatggaccgctttgaggcctatggtagtaaaggaaatagcttcatataaaagctagacagtagcattctcagaaacttctttgtgatgcttgcattcaactcacagagttgaactttcctttcgagagagaagctttgaaacactctttttccggaatctgcaagtggacatttggagggctttgaggcctgtggtggaaaaggaattatcttcccgtaaaagctagatagaagcattgtcagaaacttctttgagatgattgcattcaactcacagagttgaaggttccttttcaaacagcagtttccaatcactctttctgtggaatctgcaagtggatatttcgacctctttgaagatttcgttggaaacgggagaatcttcacagaaaagctaaacagaagcattctcagaacttctctgtgatgtttgtgttcaactcccagagtttcacgttgcttttcatagagtagttctgaaacatgcttttcgtagtgtctgcaagtggacatttggagcgctttcaggcctgtggtggaaaacgaattatggtcacataaaaactggagagaagccttctcagaaacttctctgtgatgattgcattcaactcacagagttgaaccctcctatggatagagcagtgttgaaactctctttttgtggaatctgcaagtggatatgtggacctctccgaagatgtctttggaaacgggaatatcttcacataaaaactaaacagaagcattctcagaatcttcttggtgatgtttgcattcaaatcccagaaggtgaaccttcctttgatagttcaggtttgaaacactctttttgtaggatctgcaagtggctatttggaccactctgtggccttcgttcgaaacgggtatatcttcgcataaaatctagacagaagcattctcagaaaatactttgtgatgattgagttgaactcacagagctgaacattcctttggatggagcaggtttgagacacactttttgtagaatctacaagtggatatttggacctctctgaggatttcgctggaaacgggataactgcacctaactaaacggaagcattctcagaaactgctttgtgatgattgcattcacctcacagagttgaacattcctattgatagagcagtttggaaacactcttgttgtggaatgtgcaagtggagatttggagcgctttgaggcctatggtagtaaagggaatagcttcatagaaaaactagacagatgcattctcaggaactttttggtgatgtttgtattcaactcccagagttgaactttcctttggaaagagcagctatgaaacactctttttctagaatctgcaagtggacgtttggagggctttgtggtttgtggtggaaaaggaaatatcttcacctaaatactagatagaagcattctcagaagcttctctgtgatgactgcattcaactcacggagttgaacactccttttgagagcgcagttttgaaactctctttctgtggcatctgcaaggggacatgtagacctctttgaagatttcgttggaaacggaataatcttcacatcaaaactatacagaagcagtctcagaatcttctttgtgatgtttgcattcaaatcccagagttgaactttcctttccaagttcacgtttgaaacactctttttgcaggatctacaagtggatatttggaccactctgtgtccttcgttcgaaacgggtatatcttcacatgacatctagacagaagctttctcagaaaattctttgggatgattgagttgagcaaacagagctgaacactccttgcgatgtagcagtttagaaacaccctttctgcagaatctgcaagtgcatatgtggacctctctgaggaattcgttggaaacgggataatttcagctgactaaacagaagcattctcagaaccttcttcgtgatgtctgcattcaactcacagtgtggaacctttctttgatagttcaggtttgaaagactctttttgtagaaactgcaaggggatcattgcacttctttgaggcctaccgtagtaaaggaaataacttcctataaaaagaagacagaagcattctcagaaccttcttcgtgatgtttgcattcaactcacaagtgctgaacctttctttgatagttcagctttgaaacactctttttgtagaaactgcaagtggatatttggtcctctctgaggatttcgttggaaacgggataaaccgcacagaactaaacagaagcattctcagaaccttcttcgtgatgtttgcattcaactcacagtgttgaacctttctttgatagttcaggtttgaaacggtctttctgtagaaactgcaagtagatatttggacctctctgaggatttcgttggaaacgggataacccgcacagaactaaaacagaagcattcacagaaaactcttggtgacgactgagtttaactcacagagctgaacattcctttggatggagcagtttcgaaacacactatttgtagaatgtgcaagtggatatttaggcctctctgaggatttcgttggaaacgggataaaccgcacagaactaaacagaagcattctcagaaactactttgtgatgattgcattcaagtcacagagttgaacattccctttgacagagcagtttggaaactctctttgtgtagaatctgcaagtggagatatggaccgctttgaggcctatggtagtaaaggaaatagcttcatataaaagctagacagtagcattctcagaaacttctttgtgatgcttgcattcaactcacagagttgaactttcctttcgagagagaagctttgaaacactctttttccagaatgtgcaagtggacatttgggagctttgaggcctgtggaggaaaaggaattatcttcccgtaaaagctagatagaagcattgtcagaaacttctttgtgatgattgcattcaactcacagagttgaaggttccttttcaaacagcagtttccaatcactctttctgtggaatctgcaagtggatatttcgacctctttgaagatttcgttggaaacgggagaatcttcacagaaaagctcaacagaagcattctcagaaacttctctgtgatgtttgtgttcaactcccagagtttcacgttgcttttcatagagtagttctgaaacatgcttttcgtagtgtctgcaagtggacatttggagcgctttcaggcctgtggtggaaaacgaattatggtcacataaaaactggagagaagccttctcagaaacttctctgtgatgattgcattcaactcacagagttgaaccctcctatggatagagcagtgttgaaactctctttttgtggaatctgcaagtggatatgtggacctctccgaagatgtctttggaaacgggaatatcttcacataaaaactaaacagaagcattctcagaaacttcttggtgatgtttgcattcaaatcccagagttgaaccttcctttgatagttcaggtttgaaacactctttttgtaggatctgcaagtggatatttggaccactctgtggccttcgttcgaaacgggtatatcttcgcataaaatctagacagaagcattctcagaaaatactttgtgatgattgagtttaactcacagagctgaacattcctttggatggagcaggtttgagacacactttttgtagaatctacaagtggatatttggacctctctgaggatttcgttggaaacgggataactgcacctaactaaacggaagcattctcagaaactgctttgtgatgattgcattcacctcacagagttgaacattcctattgatagagcagtttggaaacactcttgttgtggaatgtgcaagtggagatttggagcgctttgaggcctgtggtagtaaagggaatagcttcatagaaaaactagacagatgcattctcaggaactttttggtgatgtttgtattcaactcccagagttgaactttcctttggaaagagcagctatgaaacactctttttctagaatctgcaagtggacgtttggagggctttgtggtttgtggtggaaaaggaaatatcttcacctaaatactagatagaagcattctcagaagcttctctgtgatgactgcattcaactcacggagttgaacactccttttgagagcgcagttttgaaactctccttctgtggcatccgcaaggggacatgtggacctctttgaagatttcgttggaaacggaatcatcttcacataaaaactatacagaagcagtctcagaatcttctttgtgatgtttgcattcaaatcccagagttgaactttcctttcaaagttcacgtttgaaacactctttttgcaggatctacaagtggatatttggaccactccgtgtcctccgttcgaaacgggtatatcttcacatgacatctagacagaagctttctcagaaaattctttgggatgattgagtggaactcacagagctgaacattccttgcgatggagcagtttagaaacacactttctgcagaatctgcaagtgcatatttggacctctctgaggaattcgttggaaacgggataatttcagctgactaaacagaagcattctcagaaccttcttcgtgatgtctgcattcaactcacagtgtggaacctttctttgatagttcaggtttgaaacactctttttgtagaaactgcaaggggataattgcacttctttgaggcctaccgtagtaaaggaaataacttcctataaaaagaagacagaagcattctcagaaccctcttcgtgatgtttgcattcaactcacagtgctgagcctttcttcgatagttcagctttgaaacactctttttgtagaaactgcaagtggatatttggtcctctctgaggatttcgttggaacagggataaaccgcacagaactaaacagaagaattctcagagccctcttcgtgatgtttgcattcaactcacagtgctgaacctttctttgatagtgcagctttgaaacactctttttgtagaaactgcaagtggatgtttggtcctctctgaggatttcgttggaaacgggataaaccgcacagaactaaaacagaagcattgtcagaaacttctttgtgatgattgcattcaactcacagagttgaaggttccttttcaaacagcagtttccaatcactctttctgtggaatctgcaagtggatatttgggcctctctgaggatttcgttggaaacgggataaaacgcacagaactaaaacagaagcattctcagaaacttctctgtgatgtttgtgttcaactcccagagtttcacgttgcttttcatagagtagttctgaaacatgcttttcgtagtgtctgcaagtggacatttggagcgctttcaggcctgtggtggaaaacgaattatggtcacataaaaactggagagaagccttctcagaaacttctctgtgatgattgcattcaactcacagagttgaaccctcctatggatagagcagtgttgaaactctctttttgtggaatctgcaagtggatatgtggacctctccgaagatgtctttggaaacgggaatatcttcacataaaaactaaacagaagcattctcagaaacatcttggtgatgtttgcattcaaatcccagagttgaaccttcctttgatagttcaggtttgaaacactctttttgtaggatctgcaagtggatatttggaccactctgtggccttcgttcgaaacagggtacatcttcgcataaaatctagacagaagcattctcaggaaatactttgtgatgattgagttgaactcacagagctgaacattcctttggatggagcaggtttgagacacactttttgtagaatctacaagtggatatttggacctctctgaggatttcgttggaaacgggataactgcacctaactaaacggaagcattctcagaaactgctttgtgatgattgcattcacctcacagagttgaacattcctattgatagagcagtttggaaacactcttgttgtggaatgtgcaagtggagatttggagcgctttgaggcctatggtagtaaagggaatagcttcatagaaaaactagacagatgcattctcaggaactttttggtgatgtttgtattcaactcccagagttgaactttcctttggaaagagcagctatgaaacactctttttctagaatctgcaagtggacagtttggagggctttgtggtttgtggtggaaaaggaaatatcttcacctaaatactagatagaagcattctcagaagcttctctgtgatgactgcattcaactcacggagttgaacactccttttgagagcgcagttttgaaactctctttctgtggcatctgcaaggggacatgtagacctctttgaagatttcattggaaacggaatcatcttcacataaaaactatacagaagcagtctcagaatcttctttgtgatgtttgcattcaaatcccagagttgaactttcctttcaaagttcacgtttgaaacactctttttgcaggatctacaagtggatatttggaccactctgtgtccttcgttcgaaacgggtatatcttcacacgacatctagacagaagctttctcagaaaattctttgggatgattgagtggaactcacagagctgaacattccttgcgatggagcagtttagaaacacactttctgcagaatctgcaagtgcatatttggacctctctgaggaattcgttggaaacgggataatttcagctgactaaacagaagcattctcagaaccttcttcgtgatgtctgcattcaactcacagtgtggaacctttctttgatagttcaggtttgaaacactctttttgtagaaactgcaaggggataattgcacttctttgaggcctaccgtagtaaaggaaataacttcctatagaaagaagacagaagcattctcagaaccctcttcgtgatgtttgcattcaactcacagtgctgaacctttctttgatagttcagctttgaaacactcttcttgtagaaactgcaagtggatatttggtcctctctgaggatttctttggaaacgggataaaccgcacagaactaaacagaagcattctctgaactttcttcgtgatgtttgcattcaactcacagtgttgaaccttcctttgatagttcaggtttgaaacggtctttctgtagaaactgcaagtagatatttggacctctctgaggatttcgttggaaacgggataaaccgcacagaactaaaacagaagcattcacagaaaactcttggtgacgactgagtttaactcacagagctgaacattcctttggatggagcagtttcgaaacacactatttgtagaatgtgcaagtggatatttgggcctctctgaggatttcgttggaaacgggataaaccgcacagaactaaacagaagcattctcagaaactactttgtgatgattgcattcaagtcacagagttgaacattccctttgacagagcagtttggaaactctctttgtgtagaatctgcaagtggagatatggaccgctttgaggcctatggtagtaaaggaaatagcttcatataaaagctagacagtagcattctcagaaacttctttgtgatgcttgcattcaactcactgagttgaactttcctttcgagagagaagctttgaaacactctttttccagaatctgcaagtggacattcggagggctttgaggcctgtggtggaaaaggaattttcttcccgtaaaagctagatagaagcattgtcagaaacttctttgtgatgattgcattcaagtcacagagttgaaggttccttttcaaagagcagtttccaatcactctttctgtggaatctgcaagtggatatttggacctctttgaagatttcgttggaaacgggagaatcttcacagaaaagctaaacagaagcattctcagaaacttctctgtgatgtttgtgttcaactcccagagtttcacattgcttttcatagagtagttctgaaacatgcttttcgtagtgtctacaagtggacatttggagcgctttcaggcctgtggtggaaaacgaattatggtcacataaaaactggagagaagccttctcagaaacttctctgtgatgattgcattcaactcacagagttgaaccctcctatggatagagcagtgttgaaactctctttttgtggaatctgcaagtggatatgtggacctctccgaagatgtctttggaaacgggaatatcttcacataaaaactaaacagaagcattctcagaaacttcttggtgatgtttgcattcaaatcccagagttgaaccttcctttgatagttcaggtttgaaacactctttttgtaggatctgcaagtggatatttggaccactctgtggccttcgttcgaaacgggtatatcttcgcataaaatctagacagaagcattctcagaaaatactttgtgatgattgagtttaactcacagagctgaacattcctttggatggagcaggtttgagacacactttttgtagaatctacaagtggatatttggacctctctgaggatttcgttggaaacgggataactgcacctaactaaacggaagcattctcagaaactgctttgtgatgattgcattcacctcacagagttgaacattcctattgatagagcagtttggaaacactcttgttgtggaatgtgcaagtggagatttggagcgctttgaggcctatggtagtaaagggaatagcttcatagaaaaactagacagatgcattctcaggaactttttggtgatgtttgtattcaactcccagagttgaactttcctttggaaagagcagctatgaaacactgtttttctagaatctgcaagtggacgtttggagggctttgtggtttgtggtggaaaaggaaatatcttcacctaaatactagatagaagcattctcagaagcttctctgtgatgactgcattcaactcacggagttgaacactccttttgagagcgcagttttgaaactctctttctgtggcatctgcaaggggacatgtagacctctttgaagatttcgttggaaacggaatcatcttcacataaaaactatacagaagcagtctcataatcttctttgtgatgtttgcattcaaatcccagagttgaactttcctttcaaagttcacgtttgaaacactctttttgcaggatctacaagtggatatttggaccactctgtgtctttcgttcgaaacgggtatatcttcacatgacatctagacagaagctttctcagaaaattctttgggatgattgagtggaactcacagagctgaacattccttgcgatgtagcagtttagaaacacactttctgcagaatctgcaagtgcatatttggacctctctgaggaattcgttggaaacgggataatttcagctgactaaacagaagcattctcagaacttcttcgtgatgtctgcattcaactcacagtgtggaacctttctttgatagttcaggtttgaaacactctttttgtagaaactgcaaggggataattgcacttctttgaggcctaccgtagtaaaggaaataacttcctatagaaagaagacagaagcattctcagaaccctcttcgtgatgtttgcattcaactcacagtgctgaacctttctttgatagttcagctttgaaacactcttcttgtagaaactgcaagtggatatttggtcctctctgaggatttcgttggaaacgggataaaccgcacagaactaaacagaagcattctcagagccctcttcgtgatgtttgcattcaactcacagtgctgaacctttctttgatagtgcagctttgaaacactctttttgtagaaagtgcaagtggatgtttggtcctctctgaggatttcgttggaaacgggataaaccgcacagaactaaaacagaagcattgtcagaaacttctttgtgatgattgcattcaactcacagagttgaaggttccttttcaaacagcagtttccaatcactctttctgtggaatctgcaagtggatatttgggcctctctgaggatttcgttggaaacgggataaaacgcacagaactaaaacagaagcattctcagaaacttctctgtgatgtttgtgttcaactcccagagtttcacgttgcttttcatagagtagttctgaaacatgcttttcgtagtgtctgcaagtggacatttggagcgctttcaggcctgtggtggaaaacgaattatggtcacataaaaactggagagaagccttctcagaaacttctctgtgatgattgcattcaactcacagagttgaaccctcctatggatagagaagtgttgaaactctctttttgtggaatctgcaagtggatatgtggacctctccgaagatgtctttggaaacgggaatatcttcacataaaaactaaacagaagcattctcagaaacttcttggtgatgtttgcattcaaatcccagagttgaaccttcctttgatagttcaggtttgaaacactctttttgtaggatctgcaagtggatatttggaccactctgtggccttcgttcaaaacgggtacatctttgcattatatctagacagaagcattctcagaaaatactttgtgatgattgagttgaactcacagaggtgaacattcctttggatggagcaggtttgagacacactttttgtagaatctacaagtggatatttggacctctctgaggatttcgttggaaacgggataactgcacctaactaaacggaagcattctcagaaactgctttgtgatgattgcattcacctcacagagttgaacattcctattgatagagcagtttgaaaacactcttgttgtggaatgtgcaagtggagatttggagcgctttgaggcctatggtagtaaagggaatagcttcatagaaaaactagacagatgcattctcaggaactttttggtgatgtttgtattcaactcccagagttgaactttcctttggaaagagcagctatgaaacactctttttctagaatctgcaagtggacgtttggagggctttgtggtttgtggtggaaaaggaaatatcttcacctaaatactagatagaagcattctcagaagcttctctgtgatgactgcattcaactcacagagttgaacactccttttgagagcgcagttttgaaactctctttctgtggcatctgcaaggggacatgtagacctctttgaggatttcgttggaaacggaatcatcttcacataaaaactatacagaagcagtctcagaatcttctttgtgatgtttgcattcaaatcccagagttgaactttcctttcaaagttcacgtttgaaacactctttttgcaggatctacaagtggatatttggaccactctgtgtccttcgttcgaaacgggtatatcttcacatgacatctagacagaagctttctcagaaaattctttgggatgattgagtggaactcacagagctgaacattccttgcgatgtagcagtttagaaacacactttctgcagaatctgcaagtgcatatttggacctctctgaggaattcgttggaaacgggataatttcagctgactaaacagaagcattctcagaaccttcttcgtgatgtctgcattcaactcacagtgtggaacctttctttgatagttcaggtttgaaacactctttttgtagaaactgcaaggggataattgcacttctttgaggcctaccgtagtcaaggaaataacttcctatagaaagaagacagaagcattctcagaaccctcttcgtgatgtttgcattcaactcacagtgctgaacctttctttgatagttcagctttgaaacactcttcttgtagaaactgcaagtggatatttggtcctctctgaggatttcgttggaaacgggataaaccgcacagaactaaacagaagcattctcagagccctcttcgtgatgtttgcattcaactcacagtgctgaacctttctttgatagtgcagctttgaaacactctttttgtagaaactgcaagtggatgtttggtcctctctgaggatttcgttggaaacgggataaaccgcacagaactaaaacagaagcattgtcagaaacttctttgtgatgattgcattcaactcacagagttgaaggttccttttcaaacagcagtttccaatcactctttctgtggaatctgcaagtggatatttgggcctctctgaggatttcgttggaaacgggataaaacgcacagaactaaaacagaagcattctcagaaacttctctgtgatgtttgtgttcaactcccagagtttcacattgcttttcatagagtagttctgaaacatgcttttcgtagtgtctacaagtggacatttggagcgctttcaggcctgtggtggaaaacgaattatggtcacataaaaactggagagaagccttctcagaaacttctctgtgatgattgcattcaactcacagagttgaaccctcctatggatagagcagtgttgaaactctctttttgtggaatctgcaagtggatacgtggacctctccgaagatgtctttggaaacgggaatatcttcacataaaaactaaacagaagcattctcagaaacttcttggtgatgtttgcattcaaatcccagagttgaaccttcctttgatagttcaggtttgaaacactctttttgtaggatctgcaagtggatatttggaccactctgtggccttcgttcgaaacgggtatatcttcgcataaaatctagacagaagcattctcagaaaatactttgtgatgattgagtttaactcacagagctgaacattcctttggatggagcaggtttgagacacactttttgtagaatctacaagtggatatttggacctctctgaggatttcgttggaaacgggataactgcacctaactaaacggaagcattctcagaaactgctttgtgatgattgcattcacctcacagagttgaacattcctattgatagagcagtttggaaacactcttcttgtggaatgtgcaagtggagatttggagcgctttgaggtctatggtagtaaagggaatagcttcatagaaaaactagacagatgcattctcaggaactttttggtgatgtttgtattcaactcccagagttgaactttcctttggaaagagcagctatgaaacactctttttctagaatctgcaagtggacgtttggagggctttgtggtttgtggtggaaaaggaaatatcttcacctaaatactagatagaagcattctcagaagcttctctgtgatgactgcaatcaactcacggagttgaacactccttttgagagcgcagttttgaaactctctttctgtggcatctgcaaagggacatgtagacctctttgaagatttcgttggaaacggaatcatcttcacataaaaactatacagaagcagtctcagaatcttctttgtgatgtttgcattcaaatcccagagttgaactttcctttcaaagttcacgtttgaaacactctttttgcaggatctacaagtggatatttggaccactctgtgtccttcgttcgaaacgggtatatcttcacaggacatctagacagaagctttctcagaaaattctttgggatgattgagtggaactcacagagctgaacattccttgcgatgtagcagtttagaaacacactttctgcagaatctgcaagtgcatatttggacctctctgaggaattcgttggaaacgggataatttcagctgactaaacagaagcattctcagaaccttcttcgtgatgtctgcattcaactcacagtgtggaacctttctttgatagttcaggtttgaaacactctttttgtagaaactgcaaggggataattgcacttctttgaggcctaccgtagtaaaggaaataacttcctatagaaagaagacagaagcattctcagaaccctcttcgtgatgtttgcattcaactcacagcgatgaaactttctttgatagttcagctttgaaacactcttcttgtagaaactgcaagtggatatttggtcctctctgaggatttcgttggaaacgggataaaccgcacagaactaaacagaagcattctcagaaccttcttcgtgatatttgcattcaactcacactgctgaacctttctttgatagttcagctttgaaacactctttttgtagaaactgcaagtggatatttggtcctctctgaggatttcgttggaaacgggataaaccgcacagaactaaacagaagcattcacagaaaacgcttggtgacgactgagtttaactcacagagctgaacattcctttggatggagcagtttcgaaacacactatttgtagaatctgcaagtggatatttgggcctctctgaggatttcgttggaatcgggataaaccgcacagaactaaaacagaagcattctcagaaactactttgtgatgattgcattcaagtcacagagttgaacattccctttgacagagcagtttggaaactctctttgtgtagaatctgcaagtggagatatggaccgctttgaggcctatggtagtaaaggaaatagcttcatataaaagctagacagtagcattctcagaaacttctttgtgatgcttgcattcaactcacagagttgaacattcctttcgagagagaagctttgaaacactctttttccagaatctgcaaggggacatttggagggctttgaggcctgtggtggaaaaggaattaccttcccgtaaaagctagatagaagcattgtcagaaacttctttgtgatgattgcattcaactcacagagttgaaggttccttttcaaacagcagtttccaaacactctttctgtggaatctgcaagtggatatttggacgtctttgaagatttcgttggaaaagggataatcttcacagaaaagctaaacagaagcattctcagaaacttctctgtgatgtttgtgttcaactcccagagtttcacgttgcttttcatagagtagttctgaaacatgcttttcgtagtgtctgcaagtggacatttggagcgctttcaggcctgtggtggaaaacgaattatggtcacaaaaaaactggagagaagccttctcagaaacttctctgtgatgattgcattcaactcacagagttgaaccctcctatggatagagcagtgttgaaactctctttttgtggaacctgcaagtggatatgtggacctctccgaagatgtctttggaaacgggaatatcttcacataaaaactaaacagaagcattctcagaaacttcttggtgatgtttgcattcaaatcccagagttgaaacttcctttgagagttcaggtttgaaacactctttttgtaggatctgcaagtggatatttggaccactctgtggccttcgttcgaaacgggtacatcttcgcataaaatctacacagaagcattctcagaaaatactttgtgatgattgagttgaactcacagagctgaacattcctttggatggagcaggtttgagacacactttttatagaatctacaaggggatatttggacctctctgaggatttcgttggaaaacgggtaactgcacctaactaaacggaagcattctcagaaactgctttgtgatgattgcattcacctcacagagttgaacattcctattgatagagcagtttggaaacactcttcttgtggaatgtgcaagtggagatttggagcgctttgaggcctatggtagtaaagggaatagcttcatagaaaaactagacagatgcattctcaggaactttttggtgatgtttgtattcaactcccagagttgaactttcctttggaaagagcagctatgaaacactctttttctagaatctgcaagtggacgtttggagggctttgtggtttgtggtggaaaaggaaatatcttcacctaaatactagaaagaagcattctcagaagcttctctgtgatgactgcattcaactcacggagttgaacactccttttgagagcgcagttttgaaactctctttctgtggcatctgcaagggacatgtagacctctttgaagatttcgttggaaacggaatcatcttcacataaaaactatacagaagcagtctcagaatcttctttgtgatgtttgcattcaaatcccagagttgaactttcctttcaaagttcacgtttgaaacactctttttgcaggatctacaagtggatatttggaccactctgtgtccttcgttcgaaacgggtatatcttcacaggacatctagacagaagctttctcagaaaattctttgggatgattgagtggaactcacagagctgaacattccttgcgatgtagcagtttagaaacacactttctgcagaatctgcaagtgcatatttggacctctctgaggaattcgttggaaacgggataatttcagctgactaaacagaagcattctcagaaccttcttcgtgatgtctgcattcaactcacagtgtggaacctttctttgatagttcaggtttgaaacactctttttgtagaaactgcaaggggataattgcacttctttgaggcctaccgtagtaaaggaaataacttcctatagaaagaagacagaagcattctcagaaccctcttcgtgatgtttgcattcaactcacagtgctgaacctttctttgatagttcagctttgaaacactcttcttgtagaaactgcaagtggatattttgtcctctctgaggatttcgttggaaacgggataaaccgcacagaactaaacagaagaattctcagagccctcttcgtgatgtttgcattcaactcacagtgctgaacctttctttgatagtgcagctttgaaacactcttcttgtagaaactgcaagtggatgtttggtcctctctgaggatttcgttggaaacgggataaaccgcacagaactaaaacagaagcattgtcagaaacttctttgtgatgattgcattcaactcacagagttgaaggttccttttcaaacagcagtttccaatcactctttctgtggaatctgcaagtggatatttgggcctctctgaggatttcgttggaaacgggataaaacgcacagaactaaaacagaagcattctcagaaacttctctgtgatgtttgtgttcaactcccagagtttcacgttgcttttcatagagtagttctgaaacatgcttttcgtagtgtctgcaagtggacatttggagcgctttcaggcctgtggtggaaaacgaattatggtcacataaaaactggagagaagccttctcagaaacttctctgtgatgattgcattcaactcacagagttgaaccctcctatggatagagcagtgttgaaactctctttttgtggaatctgcaagtggatatgtggacctctccgaagatgtctttggaaacgggaatatcttcacataaaaactaaacagaagcattctcagaaacttcttggtgatgtttgcattcaaatcccagagttgaaccttcctttgatagttcaggtttgaaacactctttttgtaggatctgcaagtggatatttggaccacactgtggcctttgttcgaaacgggtacatcttcgcataaaatctagacagaagcattctcagaaaatactttgtgatgattgagttgaactcacagagctgaacattcctttggatggagcaggtttgagacacactttttgtagaatctacaagtggatatttggacctctctgaggatttcgttggaaacgggataactgcacctaactaaacggaagcattctcagaaactgctttgtgatgattgcattcacctcacagagttgaacattcctattgatagagcagtttggaaacaatcttgttgtggaatgtgcaagtggagatttggagcgctttgaggcctatggtagtaaagggaatagcttcatagaaaaactagacagatgcattctcaggtaactttttggtgatgtttgtattcaactcccagagttgaactttcctttggaaagagcagctatgaaacactctttttctagaatctgcaagtggacgtttggagggctttgtggtttgtggtggaaaaggaaatatcttcacctaaatactagatagaagcattctcagaagcttctctgtgatgactgcattcaactcacggagttgaacactccttttgagagcgcagttttgaaactctctttctgtggcatctgcaaggggacatgtagacctctttgaatatttcgtaggaaacggaatcatcttcacataaaaactatacagaagcagtctcagaatcttctttgtgatgtttgcattcaaatcccagagttgaactttcctttcaaagttcacgtttgaaacactctttttgcaggatctacaagtggatatttggaccactctgtgtccttcgttcgaaacgggtatatcttcacatgacatctagacagaagctttctcagaaaattctttgggatgattgagtggaactcacagagctgaacattccttgcgatgtagcagtttagaaacacactttctgcagaatctgcaagtgcatatttggacctctctgaggaattcgttggaaacgggataatttcagctgactaaacagaagcattctcagacacccttcttcgtgatgtctgcattcaactcacagtgtggaacctttctttgatagttcaggtttgaaacactctttttgtagaaactgcaaggggataattgcacttctttgaggcctaccgtagtaaaggaaataacttcctatagaaagaagacagaagaattctcagagccctcttcgtggtgtttgcattcaactcacagtgctgaacctttctttgatagtgcagctttgaaacactctttttgtagaaactgcaagtggatatttggtcctctctgaggatttcgttggaaacgggataaaccgcacagaactaaaacagaagcattcacagaaaactcttggtgacgactgagtttaactcacagagctgaacattcctttggatggagcagtttcgaaacacactatttgtagaatctgcaagtggatatttgggcctctctgaggatttcgttggaaacgggataaaacgcacagaactaaaacagaagcattctcagaaactactttgtgatgattgcattcaagtcacagagttgaacattccctttgacagagcagtttggaaactctctttgtgtagaatctgcaagtggagatatggaccgctttgaggcctatggtagtaaaggaaatagcttcatataaaagctagacagtagcattctcagaaacttctttgtgatgcttgcattcaactcacagagttgaactttcctttcgagagagaagctttgaaacactcttttctagaatctgcaagtggacatttggagggcattgaggcctgtggtggaaaaggaattatcttcccgtaaaagctagatagaagcattgtcagaaacttctttgtgatgattgcattcaactcacagagttgaaggttccttttcaaagagcagtttccaatcactctttctgtggaatctgcaagtggatatttggacctctttgaagatttcgttggaaacgggagaatcttcacagaaaagctaaacagaagcattctcaggaaacttctctgtgatgtttgtgttcaactcccagagtttcacattgcttttcatagagtagttctgaaacatgcttttcgtagtgtctacaagtggacatttggagcgttttcaggcctgtggtggaaaacgaattatggtcacataaaaactggagagaagccttctcagaaacttctctgtgatgattgcattcaactcacagagttgaaccctcctatggatagagcagtgttgaaactctctttttgtggaatctgcaagtggatatgtggacctctccgaagatgtctttggaaacgggaatatcttcacataaaaactaaacagaagcattctcagaaacttcttggtgatgtttgcattcaaatcccagagttgaaccttcctttgatagttcaggtttgaaacactctttttgtaggatctgcaagtggatatttggaccactctgtggccttcgttcgaaacgggtatatcttcgcataaaatctagacagaagcattctcagaaaatactttgtgatgattgagtttaactcacagagctgaacattcctttggatggagcaggtttgagacacactttttgtagaatctacaagtggatatttggacctctctgaggatttcgttggaaacgcgataactgcacctaactaaacggaagcattctcagaaactgctttgtgatgattgcattcacctcacagagttgaacattcctattgatagagcagtttggaaacactcttgttgtggaatgtgcaagtggagatttggagcgctttgaggcctatggtagtaaagggaatagcttcatagaaaaactaggcagatgcattctcaggaactttttggtgatgtttgtattcaactcccagagttgaactttcctttggaaagagcagctatgaaacactctttttctagaatctgcaagtggacgtttggagggctttgtggtttgtggtggaaaaagaaatatcttcacctaaatactagatagaagcattctcagaagcttctctgtgatgactgcattcaactcacggagttgaacactccttttgagagcgcagttttgaaactctctttctgtggcatctgcaaggggacatgtagacctctttgaagatttcgttggaaacggaatcatcttcacataaaaactatacagaagcagtctcagaatcttctttgtgatgtttgcattcaaatcccagagttgaactttcctttcaaagttcacgtttgaaacactctttttgcaggatctacaactggataattggaccactctgtgtccttcgttcgaaacgggtatatcttcacatgacatctagacagaagctttctcagaaaattctttgggatgattgagtggaactcacagagctgaacattccttgcgatggagcagtttagaaacacactttctgcagaatctgcaagtgcatatttggacctctctgaggaattcgttggaaacgggataatttcagctgactaaacagaagcattctcagaaccttcttcgtgatgtctgcattcaactcacagtgtggaacctttctttgatagttcaggtttgaaacactctttttgtagaaactgcaaggggataattgcacttctttgaggcctaccgtagtaaaggaaataacttcctatagaaagaagacagaagcattctcagaaccctcttcgtgatgtttgcattcaactcacagtgctgaacctttctttgatagttcagctttgaaacactcttcttgtagaaactgcaagtggatatttggtcctctctgaggatttcgttggaaacgggataaaccgcccagaactaaacagaagcattctcagaaccttcttcgtgatgtttgcattcaactcacagtgttgaacctttctttgatagttcaggtttgaaacggtctttctgtggaaactgcaagtagatatttggacctctctgaggatttcgttggaaacgggataaaccgcacagaactaaaacagaagcattcacagaaaactcttggtgacgactgagtttaactcacagagctgaacattcctttggatggagcagtttcgaaacacactatttctagaaggtgcaagtggatatgtgggcctctctgaggatttcgttggaaacgggataaaccgcacagaactaaacagaagcattctcagaaactactttgtgatgattgcattcaagtcacagagttgaacattccctttgacagagcagtttggaaactctctttgtgtagaatctgcaagtggagatatggaccgctttgaggcctatggtagtaaaggaaatagcttcatataaaagctagacagtagcattctcagaaacttctttgtgatgcttgcattcaactcacagagttgaactttcctttcgagagagaagctttgaaacactctttttccagaatctgcaagtggacatttggagggctttggggcctgtggtggaaaaggaattatcttcccgtaaaagctagatagaagcattgtcagaaacttctttgtgatgattgcattcaactcacagagttgaaggttccttttcaaagagcagtttccaatcactctttgtgtggaatctgcaagtggatatttggacctattttgaagatttcgttggaaacgggagaatcttcacaggaaagctaaacagaagcattctcagaaacttctctgtgatgtttgtgttcaactcccagagtttcacattgcttttcatagagtagttctgaaacatgcttttcgtagtgtctacaagtggacatttggagcgctttcaggcctgtggtggaaaacgaattatggtcacataaaaactggagagaagccttctcagaaacttctctgtgatgattgcattcaactcacagagttgaaccctcctatggatagagcagtgttgaaactctctttttgtggaatctgcaagtggatacgtggacctctccgaagacgtctttcgaaacgggaatatcttcacataaaaactaaacagaagcattctcagaaacttcttggtgatgtttgcattcaaatcccagagttgaaccttcctttgatagttcaggtttgaaacactctttttgtaggatctgcaagtggatatttggaccactctgtggccttcgttcgaaacgggtatatcttcgcataaaatctagacagaagcattctcagaaaatactttgtgatgattgagtttaactcacagagctgaacattcctttggatggagcaggtttgagacacactttttgtagaatctacaagtggatatttggacctctctgaggatttcgttggaaacgcgataactgcacctaactaaacggaagcattctcagaaactgctttgtgatgattgcattcacctcacagagttgaacattcctattgatagagcagtttggaaacactcttgttgtggaatgtgcaagtggagatttggagcgctttgaggcctatggtagtaaagggaatagcttcatagaaaaacaaggcagatgcattctcaggaactttttggtgatgtttgtattcaactcccagagttgaactttcctttggaaagagcagctatgaaacactctttttctagaatctgcaagtggacgtttggagggctttgtggtttgtggtggaaaaggaaatatcttcacctaaatactagatagaagcattctcagaagcttctctgtgatgactgcattcaactcacggggttgaacactccttttgggagcgcagttttgaaactctctttctgtggcatctgcaaggggacatgtagacctctttgaagatttcgttggaaacggaatcatcttcacataaaaactatacagaagcagtctcagaatcttctttgtgatgtttgcattcaaatcccagagttgaactttcctttcaaagttcacgtttgaaacactctttttgcaggatctacaagtggatatttggaccactctgagtccttcgttcgaaacgggtatatcttcacatgacatctagacagaagctttctcagaaaattgtttgggatgattgatttgaactcacagagctgagcattccttgcgatgtagcagtttagaaacacactttctgcagaatctgcaagtgcatatttggacctctctgaggaattcgttggaaacgggataatttcagctgactaaacagaagcattctcagaaccttcttcgtgatgtctgcattcaactcacagtgtggaacctttctttgatagttcaggtttgaaacactctttttgtagaaactgcaaggggataattgcactctttgaggagtactgtagtaaaggaaataacttcctataaaaagaagacagaagaattctcagagccctcttcgtgatgtttgcattcaactcacagtgctgaacctttctttgatagtgcagctttgaaacactctttttgtagaaactgcaagtggatgtttggtcctctctgaggatttcgttggaaacgggataaaccgcacagaactaaaacagaagcattgtcagaaacttctttgtgatgattgcattcaactcacagagttgaaggttccttttcaaacagcagtttccaatcactctttctgtggaatctgcaagtggatatttgggcctctctgaggatttcgttggaaacgggataaaacgcacagaactaaaacagaagcattctcagaaacttctctgtgatgtttgtgttcaactcccagagtttcacattgcttttcatagagtagttctgaaacatgcttttcgtagtgtctgcaagtggacatttggagcgctttcaggcctgtggtggaaaacgaattagggtcacataaaaactggagagaagccttctcagaaacttctctgtgatgattgcattcaactcacagagttgaaccctcctatggatagagcagtgttgaaactctctttttgtggaatctgcaagtggacatgtggacctctccgaagatgtctttggaaacgggaatatcttcacataaaaactaaacagaagcattctcagaaacttcttggtgatgtttgcattcaaatcccagagttgaaccttcctttgatagttcaggtttgaaacactctttctgtaggatctgcaagtggctatttggaccactctgtggccttcgttcgaaacgggtatatcttcgcataaaatctagacagaagcattctcagaaaatactttgtgatgattgagtttaaatcacagagctgaccattcctttggatggagcaggtttgagacacactttttgtagaatctacaagtggatatttggacctctctgaggatttcgttggaaacgggataactgcacctaactaaacggaagcattctcagaaactgctttgtgatgattgcattcacctcacagagttgaacattcctattgatagagcagtttggaaacactcttgttgtggaatgtgcaagtggagatttggagcgctttgaggcctatggtagtaaagggaatagcttcatagaaaaactagacagatgcattctcaggaactttttggtgatgtttgtattcaactcccagagttgaactttcctttggaaagagcagctatgaaacactctttttctagaatctgcaagtggacgtttggagggctttgtggtttgtggtggaaaaggaaatatcttcacctaaatactagatagaagcattctcagaagcttctctgtgatgactgcattcaactcacggagttgaacactccttttgagagcgcagttttgaaactctctttctgtggcatctgcaaggggacatgtagacctctttgaagatttcattggaaacggaatcatcttcacatcaaaactatacagaagcagtctcagaatcttctttgtgatgtttgcattcaaatcccagagttgaactttcctttccaagttcacgtttgaaacactctttttgcaggatctgcaagtggatatttggaccactctgtgtccttcgttcgaaacgggtatatcttcacatgacatctagacagaagctttctcagaaaattccttgggatgattgagttgagcaaacagagctgaacactccttgcgatgtagcagtttagaaacacactttctgcagaatctgcaagtgcatatgtggacctctctgaggaaatcgttggaaacgggataatttcagctgactaaacagaagcattctcagaaccttcttcgtgatgtctgcattcaactcacagtgtggaacctttctttgatagttcaggtttgaaacactctttttgtagaaactgcaaggggatcattgcacttctttgaggcctaccgtagtaaaggagataacttcctataaaaagaagacagaagcattctcagaaccctcttcgtgatgtttgcattcaactcacagtgctgaacctttctttgatagttcagctttgaaacactcttcttgtagaaactgcaagtggatatttggtcctctctgaggatttcgttggaaacgggataaaccgcacagaactaaacagaagcattctcagaaccttcttcgtgatgtttgcattcaactcacagtgttgaacctttctttgatagttcatgttggaaacggtctttctgtagaaactgcaagtagatatttggacctctctgaggatttcgttggaaacgggataaaccgcacagaactaaaacagaagcattcacagaaaattcttggtgacgactgagttcaactcacagagctgaacattcctttggatggagcagtttcgaaacacactatttgtagaatgtgcaagtggatatttgggcctctctgaggatttcgttggaaacgggataaaccgcacagaactaaacagaagcattctcagaaactactttgtgatgattgcattcaagtcacagagttgaacattccctttgacagagcagtttggaaactctctttgtgtagaatctgcaagtggagatatggaccgctttgaggcctatggtagtaaaggaaatagcttcatataaaagctagacagtagcattctcagaaacttctttgtgatgcttgcattcaactcacagagttgaactttcctttcgagagagaagctttgaaacactctttttccagaatctgcaagtggacatttggagggctttgaggcctgtggtggaaaaggaattaacttcccgtaaaagctagatagaagcattgtcagaaacttctttgtgatgattgcattcaactcacagagatgaaggttcctttacaaacagcagtttccaaacactctttctgtggaatctgcaagtggatatttggacctctttgaagatttcgttggaaacgggagaatcttcacagaaaagcgaaacagaagcattctcagaaacttctctgtgatgtttgtgttcaactcccagagtttcacgttgcttttcatagagtagttctgaaacatgcttttcgtagtgtctgcaagtggacatttggagcgctttcaggcctgtggtggaaaacgaattatggtcacataaaaactggagagaagccttctcagaaacttctctgtgatgattgcattcaactcacagagttgaaccctcctatggatagagcagtgttgaaactctctttttgtggaatctgcaagtggatatgtggacctctccgaagatgtctttggaaacgggaatatcttcacataaaaactaaacagaagcattctcagaaacttcttggtgatgtttgcattcaaatcccagagttgaaccttcctttgatagttcaggtttgaaacactctttttgtaggatctgcaagtggctatttggaccactctgtggccttcgttcgaaacgggtatatcttcgcataaaatctagacagaagcattctcagaaaatactttgtgatgattgagttgaactcacagagctgaacattcctttggatggagcaggtttgagacacactttttgtagaatctacaagtggatatttggacctctctgaggatttcgttggaaacgggataactgcacctaactaaacggaagcattctcagaaactgctttgtgatgattgcattcacctcacagagttgaacattcctattgatagagcagtttggaaacactcttgttgtggaatgtgcaagtggagatttggagcgctttgaggcctatggtagtaaagggaatagcttcatagaaaaactagacagatgcattctcaggaactttttggtgatgattgtattcaactcccagagttgaactttcctttggaaagagcagctatgaaacactctttttctagaatctgcaagtggacgtttggagggctttgtggtttgtggtggaaaaggaaatatcttcacctaaatactagagagaagcattctcagaagcttctctgtgatgactgcattcaactcacggagttgaacactccttttgagagcgcagttttgaaactctctttctgtggcatccgcaatgggacatgtagacctctttgaagatttcgttggaaacggaatcatcttcacataaaaactatacagaagcagtctcagaatcttctttgtgatgtttgcattcaaatcccagagttgaactttcctttccaagttcacgtttgaaacagtctttttgcaggatctacaagtggatatttggaccactctgtgtccttcgttcgaaacgggtatatcttcacatgacatctagacagaagctttctcagaaaattctttggaatgattgagtggaactcacagagctgaacattccttgcgatgtagcagtttagaaacacactttctgcagaatctgcaagtgcatatttggacctctctgaggaattcgttggaaacgggataatttcagctgactaaacagaagcattctcagaaccttcttcgtgatgtctgcattcaactcacagtgtggaacctttctttgatagttcaggtttgaaacactctttttgtagaaactgcaaggggataattgcacttctttgaggcctaccgtagtaaaggaaataacttcctatagaaagaagacagaagcattctcagaaccctcttcgtgatgtttgcattcaactcacagtgctgaacctttctttgatagttcagctttgaaacactcttcttgtagaaactgcaagtggatatttggacctctctgaggatttcgttggaaacgggataaaccgcacagaactaaacagaagcattctcagaaccttcttcgtgatgtttgcattcaactcacaagtgttgaacctttctttgatagttcaggtttgaaacggtctttctgtagaaactgcaagtagatatttggacctctctgaggatttcgttggaaacgggataacccgcacagaactaaaacagaagcattcacagaaaactcttggtgacgactgagtttaactcacagagctgaacattcctttggatggagcagtttcgaaacacactatttgtagaatgtgcaagtggatatttaggcctctctgaggatttcgttggaaacgggataaaccgcacagaactaaacagaagcattctcagaaactactttgtgatgattgcattcaagtcacagagttgaacattccctttgacagagcagtttggaaactctctttgtgtagaatctgcaagtggagatatggaccgctttgaggcctatggtagtaaaggaaatagcttcatataaaagctagacagtagcattctcagaaacttctttgtgatgcttgcattcaactcacagagttgaactttcctttcgagagagaagctttgaaacactctttttccagaatgtgcaagtggagatttggagggctttgaggcctgtggtggaaaaggaattatcttcctgtaaaagctagatggaagtattgtcagaaacttctttgtgatgattgcattcaactcacagagttgaaggttccttttcaaacagcagtttccaatcactctttctgtggaatctgcaagtggatatttggacctattttgaagatttcgttggaaacgggataatcttcacagaaaagctaaacagaagcattctcagaaacttctctgtgatgtttgtgttcaactcccagagtttcacattgcttttcatagagtagttctgaaacatgcttttcgtagtgtctgcaagtggacatttggagcgctttcaggcctgtggtggaaaacgaattatggtcacataaaaactggagagaagccttctcagaaacttctctgtgatgattgcattcaactcacagagttgaaccctcctatggatagagcattgttgaaactctctttttgtggaatctgcaagtggatatgtggacctctccgaagatgtctttggaaacgggaatatcttcacataaaaactaaacagaagcattctcagaaacttcttggtgatgtttgcattcaaatcccagagttgaaccttcctttgatagttcagatttgaaacactctttttgtaggatctgcaagtggatatttggaccactctgtggccttcgttcgaaacgggtacatcttcgcataaaatctagacagaagcattctcagaaaatactttgtgatgattgagttgaactcacagagctgaacattcctttggatggagcaggtttgagacacactttttgtagaatctacaagtggatatttggacctctctgaggatttcgttggaaacgggataactgcacctaactaaacggaagcattctcagaaactgctttgtgatgattgcattcacctcacagagttgaacattcctattgatagagcagtttggaaacactcttgttgtggaatgtgcaagtggagatttggagcgctttgaggtctatggtagtaaagggaatagcttcatagaaaaactagacagatgcattctcaggaacttttttggtgatgtttgtattcaactcccagagttgaactttcctttggaaagagcagctatgaaacactctttttctaggatctgcaagtggacgtttggagggctttgtggtttgtggtggaaaaggaaatatcttcacctaaatactagagagaagcattctcagaagcttctctgtgatgactgcattcaactcacggagttgaacactccttttgagagcgcagttttgaaactctctttctgtggcatccgcaaggggacatgtagacctctttgaagatttcgttggaaacggaatcatcttcacataaaaactatacagaagcagtctcagaatcttctttgtgatgtttgcattcaaatcccagagttgaactttcctttccaagttcacgtttgaaacactctttttgcaggatctacaagtggatatttggaccactctgtgtccttcgtttgaaacgggtatatcttcacatgacatctagacagaagctttctcagaaaattctttgggatgattgagtggaactcacagagctgaacattccttgcgatgtagcagtttagaaacacactttctgcagaatctgcaagtgcatatttggacctctctgaggaattcgttggaaacgggataatttcagctgactaaacagaagcattctcagaaccttcttcgtgatgtctgcattcaactcacagtgtggaacctttctttgatagttcaggtttgaaacactctttttgtagaaactgcaaggggataattgcacttctttgaggcctaccgtagtaaaggaaataacttcctatagaaagaagacagaagcattctcagaaccctcttcgtgatgtttgcattcaactcacagtgctgaacctttctttgatagttcagctttgaaacactcttcttgtagaaactgcaagtggatatttggacctctctgaggatttcgttggaaacgggataaaccgcacagaactaaacagaagcattctcagaaccttcttcgtgatgtctgcattcaactcacagtgctgaacctttctttgacagttcagctttgaaacactctttttgtagaaactgcaagtggatatttggtcctctctgaggatttcgttggaaacggcataaaccgcacagaactaaacagaagcattcacagaaaacacttggtgacgactgagtttaactcacagagctgaacattcctttggatggggcaatttcgaaacacactatttgtagaatctgcaagtggatatttgggcctctctgaggatttcgttggaaacgggataaaccgcacagaactaaacagaagcattctcagaaactactttgtgatgattgcattcaagtcacagagttgaacattccctttgacagagcagtttggaaactctctttgtgtagaatctgcaagtggagatatggaatgctttgaggactatggtagtaaaggaaatagcttcatataaaagctagacagtagcattctcagaaacttctttgtgatgcttgcattcaactcacagagttgaactttcctttcgagagagaagctttgaaacactctttttccagaatctgcaagtggacatttggagggctttgaggcctgtggtggaaaaggaattatcttcccgtaaaagctagatagaagcattgtcagaaacttctttgtgatgattgcattcaactcacagagttgaaggttccttttcaaacagcagtttccaatcactctttctgtggaatctgcaagtggatatttgggcctctctgaggatttcgttggaaacgggataaaacgcacagaactaaaacagaagcattctcagaaacttctctgtgatgtttgtgttcaactcccagagtttcacattgcttttcatagagtagttctgaaacatgcttttcgtagtgtctgcaagtggacatttggagcgctttcaggcctgtggtggaaaacgaattatggtcacataaaaactggagagaagccttctcagaaacttctctgtgatgattgcattcaactcacagagttgaaccctcctatggatagagcagtgttgaaactctctttttgtggaatctgcaagtggatatgtggacctctccgaagatgtctttggaaacgggaatatcttcacataaaaactaaacagaagcattctcagaaacttcttggtgatgtttgcattcaaatcccagagttgaaccttctttgatagttcaggtttgaaacactctttttgtaggatctgcaagtggatatttggaccactctgtggccttcgttcgaaacgggtatatcttcgcataaaatctagacagaagcattctcagaaaatactttgtgatgattgagtttaaatcacagagctgaacattcctttggatggagcaggtttgagacacactttttgtagaatctacaagtggatatttggacctctctgaggatttcgttggaaacgggataactgcacctaactaaacggaagcattctcagaaactgctttgtgatgattgcactcacctcacagagttgaacattcctattgatagagcagtttggaaacactcttgttgtggaatgtgcaagtggagatttggagcgctttgaggcctatggtagtaaagggaatagcttcatagaaaaactagacagatgcattctcaggaactttttggtgatgtttgtattcaactcccagagttgaactttcctttggaaagagcagctatgaaacactctttttctagaatctgcaagtggacgtttggagggctttgtggtttgtggtggaaaaggaaatatcttcacctaaatactagatagaagcattctcagaagcttctctgtgatgactgcattcaactcacggagttgaacactccttttgagagcgcagttttgaaactctctttctgtggcatctgcaaggggacatgcagacctctttgaagatttcgttggaaacggaatcatcttcacataaaaactatacagaagcagtctcagaatcttctttgtgatgtttgcattcaaatcccagagttgaactttcctttcaaagttcacgtttgaaacactctttttgcaggatctacaagtggatatttggaccactctgtgtcctacgttcgaaacgggtatatcttcacatgacatctagacagaagctttctcagaaaattctttgggatgattcagttcagcaaacagagctgaacactccttgcgatgtagcagtttagaaacacacgttctgcagaatctgcaagtgcatatgtggacctctctgaggaattcgttggaaacgggataatttcagctgactaaacagaagcattctcagaaccttcttcgtgatgtctgcattcaactcacagtgtggaacctttctttgatagttcaggtttgaaacactctttttgtagaaactgcaaggggataattgcacttctttgaggcctaccgtagtaaaggaaataacttcctatagaaagaagacagaagcattctcagaaccctcttcgtgatgtttgcattcaactcacagtgctgaacctttctttgatagttcagctttgaaacactcttcttgtagaaactgcaagtggatatttggtcctctctgaggatttcgttgcgaaaggggataaaccgcacagaactaaacagaagcattctcagaaccttcttcgtgatgtttgcattcaactcacagtgttgaacctttctttgatagttcaggtttgaaacggtctttctgtagaaactgcaagtagatatttggacctctctgaggatttcgttggaaacgggataaaccgcacagaactaaaacagaagcattcacagaaaactcttggtgacgactgagcttaactcacagagctgaacattcctttggatggagcagtttcgaaacacactatttgtagaatgtgcaagtggatattggggcctctctgaggatttcgttggaaacgggataaaccgcacagaactaaacagaagcattctcagaaaatactttgtgatgattgcattcaagtcacagagttgaacattccctttgacagagcagtttggaaactctctttgcgtagaatctgcaagtggagatatggaccgctttgaggcctatggtagtaaaggaaatagcttcatataaaagctagacagcagcattctcagaaacttctttgtgatgcttgcattcaactcacagagttgaactttcctttcgagagagaagctttgaaacactctttttccagaatctgcaagtggatatttggagggctttgaggcctgtggtggaaaaggaattatcttcccgtaaaagctagatagaagcattgtcagaaacttctttgtgatgattgcattcaagtcacagagttgaaggttccttttcaaagagcagtttccaatcactctttctgtggaatctgcaagtggatatttggacctctttgaagatttcgttggaaacgggagaatcttcacagaaaagctaaacagaagcattctcagaaacttctctgtgatgtttgtgttcaactcccagagtttcacattgcttctcatagagtagttctgaaacatgcttttcgtagtgtctgcaagtggacatttggagcgctttcaggcctgtggtggaaaacgaattatggtcacataaaaactggagagaagccttctcagaaacttctctgtgatgattgcattcaactcacagagttgaaccctcctatggatagagcagtgttgaaactctctttttgtggaatctgcaagtggatatgtggacctctccgaagatgtctttggaaacgggaatatcttcacacaaaaactaaacagaagcattctcagaaacttcttggtgatgtttgcattcaaatcccagagttgaaccttcctttgagagttcaggtttgaaacactctttttgtaggatctgcaagtggatatttggaccactctgtggccttcgttcgaaacgggtacatcttcgcataaaatctagacagaagcattctcagaaaatactttgtgatgattgagttgaactcacagagctgaacattcctttggatggagcaggtttgagacacactttttgtagaatctacaagtggatatttggacctctctgaggatttcgttggaaacgggataactgcacctaactaaacggaagcattctcagaaactgctttgtgatgattgcattcacctcacagagttgaacattcctattgatagagcagtttggaaacactcttgttgtggaatgtgcaagtggagatttggagcgctttgaggcctatggtagtaaagggaatagcttcatagaaaaactagacagatgcattctcaggaaccttttggtgatgtttgtattcaactcccagaagttgaactttcctttggaaagagcagctatgaaacactctttttctagaatctgcaagtggacgtttggagggctttgtggtttgtggtggaaaaggaaatatcttcacctaaatactagatagaagcattctcagaagcttctctgtgatgactgcattcaactcacggagttgaacactccttttgagagcgcagttttgaaactctctttctgtggcatctgcaaggggacatgtagacctctttgaagatttcgttggaaacggaatcatcttcacataaaaactatacagaagcagtctcagaatcttctttgtgatgtttgcattcaaatcccagagttgaactttcctttcaaagttcacgtttgaaacactctttttgcaggatctacaagtggatatttggaccactctttgtcctacgttcgaaacgggtatatcttcacatgacatctagacagaagctttctcagaaaattctttgggttgattgagttgaactcacagagctgaacattccttgcgatgtagcagtttagaaacacactttctgcagaatctgcaagtgcatatttggacctctctgaggaattcgttggaaacgggataatttcagctgactaaacagaagcattctcagaaccttcttcgtgatgtctgcattcaactcacagtgtggaacctttctttgatagttcaggtttgaaacactctttttgtagaaactgcaaggggataattgcactctttgaggagtaccgtagtaaaggaaataacttcctataaaaagaagacagaagcattctcagaaccctcttcgtgatgtttgcattcaactcacagtgctgaacctttctttgatagttcagctttgaaacactctttttgtagaaactgcaaatggatatttggtcctctctgaggatttcgttggaaaagggataaaacgcccagaactaaacagaagcattcacagaaaactcttggtgacgactgagtttaactcacagagctgaacattcctttggatggagcagtttcaaaacacactatttgtagaatctgcaagtggatatatgggcctctctgaggatttcgttggaaacgggataaaccgcacagaactaaaacagaagcattctcagaaactactttgtgatgattgcattcaagtcacagagttgaacattccctttgacagagcagtttggaaactctctttgtgtagaatctgcaagtggagatatggaccgctttgaggcctatggtagtaaaggaaatagcttcatataaaagctagacagtagcattctcagaaacttctttgtgatgcttgcattcaactcacagagttgaactttcctttcgagagagaagctttgaaacactctttttccagaatctgcaagtggacatttggagggctttgaggcctgtggtggaaaaggaattaacttcccgtaaaagctagatagaagcattgtcagaaacttctttgtgatgattgcattcaactcacggagatgaaggttcctttacaaacagcagtttccaaacactctttctgtggaatctgcaagtggatatttggacctctttgaagatttcgttggaaacgggagaatcttcacagaaaagctaaacagaagcattctcagaaacttctctgtgatgtttgtgttcaactcccagagtttcacattgcttttcatagagtagttctgaaacatgcttttcgtagtgtctacaagtggacatttggagcgctttcaggcctgtggtggaaaacgaattatggtcacataaaaactggagagaagccttctcagaaacttctctgtgatgattgcattcaactcacagagttgaaccctccctatggatagagcagtgttgaaactctctttttgtggaatctgcaagtggatatgtggacctctccgaagatgtctttggaaacgggaatatcttcacataaaaactaaacagaagcattctcagaaacttcttggtgatgtttgcattcaaatcccagagttgaaccttcctttgatagttcaggtttgaaacactctttttgtaggatctgcaagtggatatttggaccactctgtggccttcgttcgaaacgggtacatcttcgcataaaatctagacagaagcattctcagaaaatactttgtgatgattgagttcaactcacagagctgaacattcctttggatggagcaggtttgagacacactttttgtagaatctacaagtggatatttggacctctctgaggatttcgttggaaacgggataactgcacctaactaaacggaagcattctcagaaactgctttgtgatgattgcattcacctcacagagttgaacattcctattgatagagcagtttggaaacactcctgttgtggaatgtgcaagtggagatttggagcgctttgaggcctattttagaaaagggaataacttcatagaaaaactagacagatgcattctcaggaactttttggtgatatttgtattcaactcccagagttgaactttcctttggaaagagcagctatgaaacactctttttctagaatctgcaagtggacgtttggagggctttgtggtttgtggtggaaaaggaaatatcttcacctaaatactagatagaagcattctcagaagcttctctgtgatgactgcattcaactcacggagttgaacactccttttgagagcgcagttttgaaactttctttctgtggcatctgcaaggggacatgtagacctctttgaagatttcgttggaaacggaatcatcttcacataaaaactatacagaagcagtctcagaatcttctttgtgatgtttgcattcaaatcccagagttgaactttcctttcaaagttcacgtttgaaacactctttttgcaggatctacaagtggatatttggaccactctgtgtccttcgttcgaaacgggtatatcttcacatgacatctagacagaagctttctcagaaaattctttgggatgattgagttgaactcacagagctgaacattccttgcgatggagcagtttagaaacacactttctgcagaatctgcaagtgcatatttggacctctctgaggaattcgttggaaacgggataatttcagctgactaaacagaagcattctcagaaccttcttcgtgatgtctgcattcaactcacagtgtggaacctttctttgatagttccggtttgaaacactctttttgtagagacttcaaggggataattgcacttctttgaggcctacggtagtaaaggaaataacttcctataaaaagaagacagaagcattctcagaaccttcttcgtgatatttgcattcaactcacagtgctgaacctttctttgatagttcagctttgaaacactctttttgtagaaactgcaagtggatacttggtcctctctgaggatttcgttggaaaagggatacaccgcacagaactaaacagaagcattcacagaaaacacttggtgacgactgagtttaactcacagagctgaacattcctttgtagggagcagttttgaaacacactatttgtagaatctgcaagtggatatttgggcctctctgaggatttcgatggaaacgggataaaccgcacagaactaaaacagaagcattctcagaaactacttcgtgatgattgcattcaagtcacagagcagaacattccctctgacagagcagtttggaaactctctttgtgtagcatctgcaagtggagatatggaatgctttgaggactatggtagtaaaggaaatagcttcatataaaagctagacagtagcattctcagaaacttctttgtgatgcttgcattcaactcacagagttgaactttcctttcgagagagaagcttcgaaacactctttttccagaatctgcaagtggacatttggagggctttgaggcctgtggtggaaaaggaattatcttcccgtaaaagctagatagaagcattgtcagaaacttctttgtgatgattgcattcaactcacagagatgaaggttcctttacaaacagcagtttccaaacactctttctgtggaatctgcaagtggatatttggacctctttgaagatttcgttggaaacgggagaatcttcacagaaaagctaaacagaagcattctcagaaacttctctgtgatgtttgtgttcaactcccagagtttcacattgcttctcatagagtagttctgaaacatgcttttcgtagtgtctgcaagtggacatttggagcgctttcaggcctgtggtggaaaacgaattatggtcccataaaaactggagagaagccttctcagaaacttctctgtgatgattgcattcaactcacagagttgaaccctcctatggatagagcagtgttgaaactctctttttgtggaatctgcaagtggatatgtggacctctccgaagatgtctttggaaacgggaatatcttcacataaaaactaaacagaagcattctcagaaacttcttggtgatgtttgcattcaaatcccagagtcgaaccttcctttgatagttcaggtttgaaacactctttttgtaggatctgcaagtggatatttggaccactctgtggccttcgttcgaaacgggtatatcttcgcataaaatctagacagaagcattctcagaaaatactttgtgatgattgagtttaactcacagagctgaacattcctttggatggagcaggtttgagacacactttttgtagaatctacaagtggatatttggacctctctgaggatttcgttggaaacgggataactgcacctatctaaacggaagcattctcagaaactgctttgtgatgattgcattcacctcacagagttgaacattcctattgatagagcagtttggaaacactcttgttgtggaatgtgcaagtggagatttggagcgctttgaggcctatggtagtaaagggaatagcttcatagaaaaactagacaggatgcattctcaggaactttttggtgatgtttgtattcaactcccagagttgaactttcctttggaaagagcagctatgaaacactctttttctagaatctgcaagtggacgtttggagggctttgtggtttgtggtggaaaaggaaatatcttcacctaaatactagatagaagcattctcagacgcttctctgtgatgactgcattcaactcacggagttgaacactccttttgagagcgcagttttgaaactctctttctgtggcatctgcaaggggacatgtagacctctttgaagatttcgttggaaacggaatcatcttcacataaaaactatacagaagcagtctcagaatcttctttgtgatgtttgcattcaaatccccgagttgaactttcctttcaaagttcacgtttgaaacactctttttgcaggatctacaagtggatatttggaccactctgtgtccttcgttcgaaacgggtatatcttcacatgacatctagacagaagctttctcagaaaattctttgggatgattgagttgagcaaacagtagctgaacactccttgcgatgtagcagtttagaaacaccctttctgcagaatctgcaagtgcatatgtggacctctctgaggaattcgttggaaacgggataatttcagctgactaaacagaagcattctcagaaccttcttcgtgatgtctgcattcaactcacagtgtggaacctttctttgatagttcaggtttgaaacactctttttgtagaaactgcaaggggataattgcacttctttgaggcctaccgtagtaaaggaaataacttcctatagaaagaagacagaagcattctcagaaccctcttcgtgatgtttgcattcaactcacagtgctgaacctttctttgatagttcagctttgaaacactcttcttgtagaaactgcaagtggatatttggtcctctctgaggatttcgttggaaacgggataaaccgcacagaactaaacagaagcattctcagaaccttcttcgtgatgtttgcattcaactcacagtgttgaacctttctttgatagttcaggtttgaaacggtctttctgtagaaactgcaagtagatatttggacctctttgaggatttcgttggaaacgggataaaccgcacagaactaaaacagaagcattcacagaaaactcttggtgacgactgagtttaactcacagagctgaacattcctttggatggagcagtttcgaaatacactatttgtagaatctgcaagtggatatttgggcctctctgaggatttcgttggaaacgggataaaccgcacagaactaaacagaagcattctcagaaactaatttgtgatgattgcattcaagtcacagagttgaacattccctttgacagagcagtttggaaactctctttgtgtagaatctgcaagtggagatatggaccgctttgaggcctatggtagtaaaggaaagagcttcatataaaagctagacagtagcattctcagaaacttctttgtgatgcttgcattcaactcacagagttgaactttcctttcgagagagaagctttgaaacactctttttccagaatgtgcaagtggacatttggagggctttgaggcctgtggtggaaaaggaattatcttcccgtaaaagctagatagaagcattgtcagaaacttctttgtgatgattgcattcaactcacagagttgaaggttccttttcaaacagcagtttccaatcactctttctgtggaatctgcaagtggatatttcgacctctttgaagatttcgttggaaacgggagaatcttcacagaaaagctaaacagaagcattctcagaaacttctctgtgatgtttgtgttcaactcccagagtttcacattgcttctcatagagttgttctgaaacatgcttttcgtagtgtctgcaagtggacatttggagcgctttcaggcctgtggtggaaaacgaattatggtcacataaaaactggagagaagccttctcagaaacttctctgtgatgattgcattcaactcacagagttgaaccctcctatggatagagcagtgttgaaactctctttttgtggaatctgcaagtggatatgtggacctctccgaagatgtctttggaaacgggaatatcttcacataaaaactaaacagaagcattctcagaaacttcttggtgatgtttgcattcaaatcccagagttgaaccttcctttgatagttcagctttgaaacactctttttgtaggatctgcaagtggctatttggaccactctgtggccttcattcgaaacgggtatatctttgcataaaatctagacagaagcattctcagaaaatactttgtgatgattgagtttaaatcacagagctgaacattcctttggatggagcaggtttgagacacactttttgtagaatctacaagtggatatttggacctctctgaggatttcgttggaaacgggataactgcacctaactaaacggaagcattctcagaaactgctttgtgatgattgcattcacctcacagagttgtacattcctattgatagagcagtttggaaacactcttgttgtggaatgtgcaagtggagatttggagtgctttgaggcctatggtagtaaagggaatagcttcatagaaaaactagacagatgcattctcaggaactttttggtgatgtttgtattcaactcccagagttgaactttcctttggaaagagcagctatgaaacactctttttctagaatctgcaagtggacgtttggagggctttgtggtttgtggtggaaaaggaaatatcttcacctaaatactagatagaagcattctcagaagcttctctgtgatgactgcattgaactcacggagttgaacactccttttgagagcgcagttttgaaactctctttctgtggcatctgcaaggggacatgtagacctctttgaagatttcgttggaaacggaatcatcttcacatcaaaactatacagaagcagtctcagaatcttctttgtgatgtttgcattcaaatcccagagttgaactttcctttcaaagttcacgtttgaaacactctttttgcaggatctacaagtggatatttggaccactctgtgtccttcgttcgaaacgggtatatcttcacacgacatctagacagaagctttctcagaaaattctttgggatgattgagtggaactcacagagctgaacattccttgcgatgtagcagtttagaaacacactttctgcagaatctgcaagtgcatatttggacctctctgaggaattcgttggaaacgggataatttcagcgactaaacagaagcattctcagaaccttcttcgtgatgtctgcattcaactcacagtgtggaacctttctttgatagttcaggtttgaaacactctttttgtagaaactgcaaggggataattgcacttctttgaggcctaccgtagtaaaggaaataacttcctatagaaagaagacagaagaattctcagagccctcttcgtgatgtttgcattcaactcacagtgctgaacctttctttgatagtgcagctttgaaacactctttttgtagaaactgcaagtggatgtttggtcctctctgaggatttcgttggaaacgggataaaccgcacagaactaaaacagaagcattcacagaaaactcttggtgacgactgagtttaactcacagagctgaacattcctttggatggagcagtttcgaaacacactatttgtagaatctgcaagtggatatttgggcctctctgaggatttcgttggaaacgggataaaacgcacagaacaaaaacagaagcattctcagaaactactttgtggtgattgcattcaagtcacagagttgaacattccctttgacagagcagtttggaaactctctttgtgtagaatctgcaagtggagatatggaccgctttgaggcctatggtagtaaaggaaataccttcatagaaaagccagacagtagcattctcagaaacttctttgtgatgcttgcattcaactcacagagttgaactttcctttcgagagagaagctttgaaacactctttttccagaatctgcaagtggacatttggagggctttgaggcctgtggtggaaaaggaattatcttcccgtaaaagctagatagaagcattgtcagaaacttctttgtgatgattgcattcaactcacagagttgaaggttccttttcaaacagcagtttccaatcactctttctgtggaatctgcaagtggatatttgggcctctctgaggatttcgttggaaacgggataaaacgcacagaactaaaacagaagcattctcagaaacttctctgtgatgtttgtgttcaactcccagagtttcacgttgcttttcatagagtagttctgaaacatgcttttcgtagtgtctgcaagtggacatttggagcgctttcaggcctgtggtggaaaacgaattatggtcacataaaaatggagagaaagccttctcagaaacttctctgtgatgattgcattcaactcacagagttgaaccctcctatggatagagcagtgttgaaactctctttttgtggaatctgcaagtggatatgtggacctctccgaagatgtctttggaaacgggaatatcttcacataaaagctaaacagaagcattctcagaaacttcttggtgatgtttgcattcaaatcccagagttgaactttcctttgatagttcaggtttgaaacactctttttgtaggatctgcaagtggatatttggaccactctgtggccttcgttcgaaacgggtacatcttcgcataaaatctagacagaagcattctcagaaaatactttgtgatgattgagtttaactcacagagctgaacattcctttggatggagcaggtttgagacacactttttgtagaatctacaagtggatatttggacctctctgaggatttcgttggaaacgggataactgcaccgaactaaacggaagcattctcagaaactgctttgtgatgattgcattcacctcacagagttgaccattcctattgatagagcagtttggaaacactcttgttgtggaatgtgcaagtggagatttggagcgctttgaggcctatggtagtaaagggaatagcttcgtagaaaaactagacagatgcattctcaggaactttttggtgatgtttgtattcaactcccagagttgaactttcctttgcaaagagcagctatgaaacactctttttctagaatctgcaagtggacgtttggagggctttgtggtttgtggtggaaaaggaaatatcttcacctaaatactagatagaagcattctcagaagcttctctgtgatgactgcattcaactcacggagttgaacactccttttgagagcgcagttttgaaactctctttctctggcatctgcaaggggacatgtagacctctttgaagatttcgttggaaacggaatcatcttcacataaaaactatacagaagcagtctcagaatcttctttgtgatgtttgcattcaaatcccagagttgaactttcctttcaaagttcacgtttgaaacactctttttgcaggatctacaagtggatatttggaccactctgtgtccttcgttcgaaacgggtatatcttcacacgacatctagacagaagctttctcagaaaattctttgggatgattgagtggaactcacagagctgaacattccttgcgatgtagcagtttagaaacacactttctgcagaatctgcaagtgcatatttggacctctctgaggaattcgttggaaacgggataatttcagctgactaaacagaagcattctcagaaccttcttcgtgatgtctgcattcaactcacagtgtggaacctttctttgatagttcaggtttgaaacactctttttgtagaaactgcaaggggataactgcacttgtttgaggcctatcgtagtaaaggaaataacttcctataaaaagaagacagaagcattctcagaaccctcttcgtgatgtttgcattcaactcacagtgctgaacctttctttgatagttcagctttgaaacaatctttttgtagaaactgcaagtggatatttggtcctctctgaggatttcgttggaaacggcataaaccgcacagaactaaacagaagcattctcagaaccttcttcgtgatgtttgcattcaactcacagtgttgaacctttctttgatagttcaggtttgaaacggtctttctgtagaaactgcaagtagatatttggacctctctgaggatttcgttggaaacgggataaaccgcacagaactaaaacagaagcattcacagaaaactcttggtgacgactgagtttaactcacagagctgaacattcctttggatggagcagtttcgaaacacactatttgtagaatgtgcaagtggatatttgggcctctctgaggatttcgttggaaacgggataaaccgcacagaactaaaaagaagcattctgagaaactactttgtgatgattgcatttaagtcacagagctgaacattccctttgatagagcagtttggaaactctctttgtgtagaatctgcaagtggagatatggaatgctttgaggactatggtagtaaaggaaatagtttcatataaaagctagacagtagcattctcagaaacttctttgtgatgtttacattcaactcacagagttgaactttcctttcgagagagaagctttgaaacactctttttccagaatctgcaagtggacatttggagggctttgaggcctgtggtggaaaaggaattatcttcccgtaaaagctagatagaagcattgtcagaaacttctttgtgatgattgcattcaactcacagagttgaaggttgcttttcaaacagcagcttccaaacactctttctgtggaatctgcaagtggatatttggacctctttgaagatttcgttggaaaagggataatcctcacagaaaagctaaacagaagcattctcagaaagttctctgtgatgtttgtgttcaactcccagagtgtcacattgtttctcatagagtagttctgaaacatgctttccgtagtgtctgcaaggggacatttggagcactttcaggcctgtggtggaaaacgaattatggtcacataaaaactggagagaagccttctcagaaacctctctgtgatgattgcattcaactcacagagttgaaccctcctatggatagagcagtgttgaaactctctttttgtggaatctgcaagtggatatgtggacctctccgaagatgtctttggaaacgggaatatcttcacataaaaactaaacagaagcattctcagaaacttcttggtgatgtttgcattcaaatcccagagttgaaccttcctttgatagttcaggtttgaaacactctttttgtaggatctgcaagtggatatttggaccactctgtggccttcgttcgaaacgggtacatcttcgcataaaatctagacagaagcattctcagaaaatactttgtgatgattgagtttaactcacagagctgaacattcctttggatggagcaggtttgagacacactttttgtagaatctacaagtggatatttggacctctctgaggatttcgttggaaacgggataactgcacctaactaaacggaagcattctcagaaactgctttgtgatgattgcattcacctcacagagttgaacattcctattgatagagcagtttggaaacactcttgttgtggaatgtgcaagtggagatttggagcgctttgaggcctatggtagtaaagggaatagcttcatagaaaaactagacagatgcattctcaggaactttttggtgatgtttgtattcaactcccagagttgaactttcctttggaaagagcagctatgaaacactgtttttctagaatctgcaagtggacgtttggagggctttgtggtttgtggtggaaaaggaaatatcttcacctaaatactagatagaagcatcctcagaagcttctctgtgatgactgcattcaactcacggagttgaacactccttttgagagcgcagttttgaaactctctttctgtggcatctgcaaggggacatgtagacctctttgaagatttcgttggaaacggaatcatcttcacataaaaactacacagaagcagtctcagaatcttctttgtgatgtttgcattcaaatccccgagttgaactttcctttcaaagttcacgtttgaaacactctttttgcaggatctacaagtggatatttggaccactctgtgtccttcgatcgaaacgggtatatcttcacatgacatctagacagaagctttctcagaaaattctttgggatgattgagttgaactcacagagctgagcattccttgcgatgtagcagtttagaaacacactttctgcagaatctgcaagtgcatatttggacctctgtgaggaattcgttggaaacgggataatttcagctgactaaacagaagcattctcagaaccttcttcgtgatgtctgcattcaactcacagtgtggaacctttctttgatagttcaggtttgaaacactctttttgtagaaactgcaaggggataattgcactctttgaggagtaccgtagtaaaggaaataacttcctataaaaagaagacagaagcattctcagaaccctcttcgtgatgtttgcattcaactcacagtgctgaacctttctttgatagttcagctttgaaacactcttcttgtagaaactgcaagtggatatttggtcttctctgaggatttcgttggaaacgggataaactgcacagaactaaacagaagcattctcagaaccttcttcgtgatgtttgcattcaactcacagtgttgaacctttctttgatagttcaggtttgaaacggtctttctgtagaaactgcaagtagatatttggacctctctgaggatttcgttggaaacgggataaaccgcacagaactaaacagaagcattcacagaaaactcttggtgacgactgagtttaactcacagagctgaacattcctttggatggagcagtttcgaaacacactatttgtagaatgtgcaagtggatatttgggcctctctgaggatttcgttggaaacgggataaaccgcacagaactaaacagaagcattctcagaaactactttgtgatgattgcattcaagtcacagagttgaacattccctttgacagagcagtttggaaactctctttgtgtagaatctgcaagtggagatatggaccgctttgaggcctatggtagtaaaggaaatagcttcatataaaagctagacagtagcattctcagaaacttctttgtgatgcttgcattcaactcacagagttgaactttcctttcgagagagaagctttgaaacactctttttccagaatgtgcaagtggagatttgcagggctttgaggcctgtggtggaaaaggaattatcttcccgtaaaagctagatagaagcattgtcagaaacttctttgtgatgattgcattcaactcacagagttgaaggttccttttcaaacagcagtttccaatcactctttctgtggaatctgcaagtggatatttggacctattttgaagatttcgttggaaacggaagaacattcacagaaaagctaaacagaagcattctcagaaacttctctgtgatgtttgtgttcaactcccagagtttcacgttgcttttcatagagtagttctgaaacatgcttttcgtagtgtctgcaagtggacatttggagcgctttcaggcctgtggtggaaaacgaattatggtcacataaaaactggagagaagccttctcagaaacttctctgtgatgattgcattcaactcacagagttgaaccctcctatggatagagcagtgttgaaactctctttttgtggaatctgcaagtggatatgtggacctctccgaagatgtctttggaaacgggaatatcttcacataaaaactaaacagaagcattctcagaaacttcttggtgatgtttgcattgaaatcccagagttgaaccttcctttgatagttcaggtttgaaacactctttttgtaggatctgcaagtggctatttggaccactctgtggccttcgttcgaaacgggtatatcttcgcataaaatctagacagaagcattctcagaaaatactttgtgatgattgagttgaactcacagagctgaacattcctttggatggagcaggtttgagacacactttttgtagaatctacaagtggatatttggacctctctgaggatttcgttggaaacgggataactgcacctaactaaacggaagcattctcagaaactgctttgtgatgattgcattcacctcacagagttgaacattcctattgatagagcagtttggaaacactcttgttgtggaatgtgcaagtggagatttggagcgctttgaggcctgtggtagtaaagggaatagcttcatagaaaaactagacagatgcattctcaggaacattttggtgatgtttgtattcaactcccagagttgaactttcctttggaaagagcagctatgagacactgtttctctagaatctgcaagtggacgtttggagggctttgtggtttgtggtggaaaaggaaatatcttcacctaaatactagatagaagcattctcagaagcttctctgtgatgactgcattcaactcacggagttgaacactccttttgagagcgcagttttgaaactctctttctgtggcatctgcaaggggacatgtagacctctttgaagatttcgttggaaacggaatcatcttcacataaaaactatacagaagcagtctcagaaatcttctttgtgatgtttgcattcaaatcccagagttgaactttcctttcaaagttcacgtttgaaacactctttttgcaggatctacaagtggatatttggaccactctgtgtccttcgttcgaaacgggtatatcttcacacgacatctagacagaagctttctcagaaaattctttgggatgattgagttgaactcacagatctgaacattccttgcgatgtagcagtttagaaacacactttctgcagaatctgcaagtgcatatgtggacctctctgaggaattcgttggaaacgggataatttcagctgactaaacagaagcattctcagaaccttcttcgtgatgtctgcattcaactcacagtgtggaacctttctttgatagttcaggtttgaaacactctttttgtagaaactgcaaggggataattactcttctttgaggcctaccgtagtaaaggaaataacttcctatagaaagaagacagaatcattctcagaaccctcttcgtgatgtttgcattcaactcacagtgctgaacctttctttgatagttcagctttgaaacactcttcttgtagaaactgcaagtggataattggtcctctctgaggatttcgttggaaacgggataaaccgcacagaactaaacagaagaattctcagagcccttttcgtgatgtttgcattcaactcacagtgctgaacctttctttgatagtgcagctttgaaacactctttttgtagaaactgcaagtggatatttggtcctctctgaggatttcgttggaaacgggataaaccgcacagaactaaaacagaagcattcacagaaaactcttggtgacgactgagtttaactcacagagctgaacattcctttggatggagcagtttcgaaacacactatttgtagaatctgcaagtggatatttgggcctctctgaggatttcgttggaaacgggataaaacacacagaactaaaacagaagcattctcagaaactactttgtgatgattgcattcaagtcacagagttgaacattccctttgacagagcagtttggaaactctctttgtgtagaatctgcaagtggagatatggaccgctttgaggcctatggtagtaaaggaaatagcttcatataaaagctagacagtagcattctcagaaacttctttgtgatgcttgcattcaactcacagagttgaactttcctttcgagagagaagctttgaaacactctttttccagaatgtgcaagtggacattttgggagctttgaggcctgtggtggaaaaggaattatcttcccgtaaaagctagatagaagcattgtcagaaacttctttgtgatgattgcattcaactcacagagttgaaggttccttttcaaacagcagtttccaatcactctttctgtggaatctgcaagtggatatttgggcctctctgaggatttcgttggaaacgggataaaacgcacagaactaaaacagaagcattctcagaaacttctctgtgatgtttgtgttcaactcccagagtttcacattgcttttcatagagtagttctgaaacatgcttttcgtagtgtctacaagtggacatttggagcgctttcaggcctgtggtggaaaacgaattatggtcacataaaaactggagagaagccttctcagaaacttctctgtgatgattgcattcaactcacagagttgaaccctcctatggatagagcagtgttgaaactctctttttgtggaatctgcaagtggatacgtggacctctccgaagatgtctttggaaacgggaatatcttcacataaaaactaaacagaagcattctcagtaaacttcttggtgatgtttgcattcaaatcccagagttgaaccttcctttgatagttcaggtttgaaacactctttttgtaggatctgcaagtggatatttggaccactctgtggccttcgttcgaaacgggtatatcttcgcataaaatctagacagaagcattctcagaaaatactttgtgatgattgagtttaaatcacagagctgaccattcctttggatggagcaggtttgagacacactttttgtagaatctacaagtggatatttggacctctctgaggatttcgttggaaacgggataactgcacctaactaaacggaagcattctcagaaactgctttgtgatgattgcattcacctcacagagttgaacattcctattgatagagcagtttggaaacactcttgttgtggaatgtgcaagtggagatttggaagcgctttgaggcctgtggtagtaaagggaatagcttcatagaaaaactagacagatgcattctcaggaactttttggtgatgtttgtattcaactcccagagttgaactttcctttggaaagagcagctatgaaacactctttttctagaatctgcaagtggacgtttggagggctttgtggtttgtggtggaaaaggaaatatcttcacctaaatactagatagaagcattctcagaagcttctctgtgatgactgcattcaactcacggagttgaacactccttttgagagcgcagttttgaaactctctttctgtggcatccgcaaggggacatgtggacctctttgaagatttcgttggaaacggaatcatcttcacataaaaactatacagaagcagtctcagaatcttctttgtgatgtttgcattcaaatcccagagttgaactttcctttcaaagttcacgtttgaaacactctttttgcaggatctacaagtggatatttggaccactctgtgtccttcgttcgaaacgggtatatcttcacatgacatctagacagaagctttctcagaaaattctttgggatgattgagtggaactcacagagctgaacattccttgtgatgtagcagtttagaaacacactttctgcagaatctgcaagtgcatatttggacctctctgaggagttcgttggaaacgggataatttcagctgactaaacagaaacattctcagaaccttcttcgtgatgtctgcattcaactcacagtgtggaacctttctttgatagttcaggtttgaaacactctttttgtagaaacttcaaggggataattgcacttctttgaggcctaccgtagtaaaggaaataacttcctatagaaagaagacagaagcattctcagaaccctcttcgtgatgtttgcattcaactcacagtgctgaacctttctttgatagttcagctttgaaacactcttcttgtagaaactgcaagtggatatttggtcctctctgaggatttcgttggaaacgggataaaccgcacagaactaaacagaagcattctcagaaccttcttcgtgatgtttgcattcaactcacagtgttgaacctttctttgatagttcaggttggaaacggtctttatgtagaaactgcaagtagatatttggacctctctgaggatttcgttggaaacgggataaaccgcacagaactaaaacagaagcattcacagaaaactcttggtgacgactgagtttaactcacagagctgaacattcctttggatggagcagtttcgaaacacactatttgtagaatgtgcaagtggatatttgggcctctctgaggatttcgttggaaacgggataaaccgcacagaactaaacagaagcattctcagaaactactttgtgatgattgcattcaagtcacagagttgaacattccctttgacagagcagtttggaaactctctttgtgtagaatctgcaagtggagatatggaccgctttgaggcctatggtagtaaaggaaatagcttcatataaaagctagacagtagcattctcagaaacttctttgtgatgcttgcattcaactcacagagttgaactttcctttcgagagagaagctttgaaacactctttttccagaatgtgcaagtggacatttcgagggctttgaggcctgtggtggaaaaggagttatcttcccgtaaaagctagatagaagcattgtcagaaacttctttgtgatgattgcattcaactcacagagttgaaggttccttttcaaacagcagtttccaatcactctttctgtggaatctgcaagtggatatttcgacctctttgaagatttcgttggaaacgggagaatcttcacagaaaagctaaacagaagcattctcagaaacttctctgtgatgtttgtgttcaactcccagagtttcacgttgcttttcatagagtagttctgaaacatgcttttcgtagtgtctgcaagtggacatttggagcgctttcaggcctgtggtggaaaacgaattatggtcacataaaaactggagagaagccttctcagaaacttctctgtgatgattgcattcaactcacagagttgaaccctcctatggatagagcagtgttgaaactctctttttgtggaatctgcaagtggatatgtggacctctccgaagatgtctttggaaacgggaatatcttcacataaaaactaaacagaagcattctcagaaacttcttggtgatgtttgcattcaaatgccagagttgaaccttcctttgatagttcaggtttgaaacactctttttgtaggatctgcaagtggatatttggaccactctgtggccttcgttcgaaacgggtatatcttcgcataaaatctagacagaagcattctcagaaaatactttgtgatgattgagtttaactcacagagctgaacattcctttggatggagcaggtttgagacacactttttgtagaatctacaagtggatatttggacctctctgaggatttcgttggaaacgggataactgcacctaactaaacggaagcattctcagaaactgctttgtgatgattgcattcacctcacagggttgaccattcctattgatagagcagtttggaaacactcttgttgtggaatgtgcaagtgcagatttggagcgctttgaggcctatggtagtaaagggaatagcttcatagaaaaactagacagatgcattctcaggaactttttggtgatgtttgtattcaactcccagagttgaactttcctttggaaagagcagctatgaaacactctttttctagaatctgcaagtggacgtttggagggctttgtggtttgtggtggaaaaggaaatatcttcacctaaatactagatagaagcattctcagaagcttctctgtgatgactgcattcaactcacggagttgaacactccttttgagagcacagttttgaaactctctttctgtggcatctgcaaggggacatgtagacctctttgaaggtttcgttggaaacggaatcatcttcacataaaaactatacagaagcagtctcagaatcttctttgtgatgtttgcattcaaatcccagagttgaactttcctttcaaagttcacgtttgaaacactctttttgcaggatctacaagtggatatttggaccactctgtgtccttcgttcgaaacgggtatatcttcacatgacatctagacagaagctttctcagaaaattctttgggatgattgagtggaactcacagagctgaacattccttgcgatgtagcagtttagaaacacactttctgcagaatctgcaagtgcatatttggacctctctgaggaattcgttggaaacgggataatttcagctgactaaacagaagcattctcagaaccttcttcgtgatgtctgcattcaactcacagtgtggaacctttctttgatagttcaggtttgaaacactctttttgtagaaactgcaaggggataattgcactctttgaggagtaccgtagtaaaggaaataacttcctataaaaagaagacagaagcattctcagaaccctcttcgtgatgtttgcattcaactcacagtgctgaacctttctttgatagttcagctttgaaacactctttttgtagaaactgcaagtggatatttggtcctctctgagcatttcgttggaaacgggataaactgcacagaactaaacagaagcattctcagaaccttcttcgtgatgtttgcattcaactcacagtgttgaacctttctttgatagttcaggtttgaaacggtctttctgcagaaactgcaagtagatatttggaccgctctgaggatttcgttggaaacgggataacccgcacagaactaaaacagaagcattcacagaaaactcttggtgacgactgagtttaactcacagagctgaacattcctttggatggagcagtttcgaaacacactatttgtagaatgtgcaagtggatatttaggcctctctgaggatttcgttggaaacgggttaaaccgcacagaactaaacagaagcattctcagaaactactttgtgatgattgcattcaagtcacagagttgaacattccctttgacagagcagtttggaaactctctttgtgtagaatctgcaagtggagatacggaccgctttgaggcctatggtagtaaaggaaatagcttcatataaaagctagacagtagcattctcagaaacttctttgtgatgcttgcattcaactcacagagttgaactttcctttcgagagagaagctttgaaacactctttttccagaatctgcaagtggacatttggagggctttgaggcctgtggtggaaaaggaattatcttcccgtaaaagctagatagaagcattgtcagaaacttctttgtgatgattgcattcaactcacagagttgaaggttccttttcaaacagcagtttccaatcactctttctgtggaatctgcaagtggatatttgggcctctctgaggatttcgttggaaacgggataaaacgcacagaactaaaacagaagcattctcagaaacttctctgtgatgtttgtgttcaactcccaagagtttcacgttgcttttcatagagtagttctgaaacatgcttttcgtagtgtctgcaagtggacatttggagcgctttcaggcctgtggtggaaaacgaattatggtcacttaaaaactggagagaagccttctcagaaacttctctgtgatgattgcattcaactcacagagttgaaccctcctatggatagagcagtgttgaaactctctttttgtggaatctgcaagtggatgtgtggacctctccgaagatgtctttggaaacgggaatatcttcacataaaaactaaacagaagcattctcagaaacttcttcgtgatgtttgcattcaaatcccagagttgaaccttcctttgagagttcaggtttgaaacactctttttgtaggatctgcaagtggatatttggaccactctgtggccttcgttcgaaacgggtacatcttcgcataaaatctagacagaagcattctcagaaaatactttgtgatgattgagttgaactcacagagctgaacattcctttggatggagcaggtttgagacacactttttgtagaatctacaaggggatatttggacctctctgaggatttcgttggaaacgggataactgcacctaactaaacggaagcattctcagaaactgctttgtgttgattgcattcacctcacagagttgaacattcctattgatagagcagtttggaaacactcttcttgtggaatgtgcaagtggagattcggagcgctttgaggcctatggtagtaaagggaatagcttcatagaaaaactagacagatgcattgtcaggaactttttggtgatgtttgtattcaactcccagagttgaactttcctttggaaagagcagctatgaaacactctttttctagaatctgcaagtggacgtttggagggctttgtggtttgtggtggaaaaggaaatatcttcacctaaatactagatagaagcattctcagaagcttctctgtgatgactgcattcaactcacggagttgaacactccttttgagagcgcagttttgaaactctctttctgtggcatctgcaaggggacatgtagacctctttgaagatttcgttggaaacggaatcatcttcacataaaaactatacagaagcagtctcagaatcttctttgtgatgttagcattcaaatcccagagttgaactttcctttcaaagttcacgtttgaaacactctttttgcaggatctacaagtggatatttggaccactctgtgtccttcgttcgaaacgggtatatcttcacacgacatctagacagaagctttctcagaaaattctttgggatgattgagttgaactcacagagctgaacattccttgcgatgtagcagtttagaaacacactttctgcagaatctgcaagtgcatatttggacctctctgaggaattcgttggaaacgggataatttcagctgactaaacagaagcattctcagaaccttcttcgtgatgtctgcattcaactcacagtgtggaacctttctttgatagttcaggtttgaaacactctttttgtagaaactgcaaggggataattgcacttctttgaggcctaccgtagtaaaggaaataacttcctatagaaagaagacagaagcattctcagaaccctcttcgtgatgtttgcattcaactcacagtgctgaacctttctttgatagttcagctttgaaacactctttttgtagaaactgcaagtggatatttggtcctctctgagcatttcgttggaaacgggataaactgcacagaactaaacagaagcattctcagaaccttcttcgtgatgtttgcattcaactcacagtgttgaacctttctttgatagttcaggtttgaaacggtctttctgtagaaactgcaagtagatatttggacctctctgaggatttcgttggaaacgggataacccgcacagaactaaaacagaagcattcacagaaaactcttggtgacgactgagtttaactcacagagctgaacattcctttggatggagcagtttcgaaacacactatttgtagaatgtgcaagtggatatttaggcctctctgaggatttcgttggaaacgggataaaccgcacagaactaaacagaagcattctcagaaactactttgtgatgattgcattcaagtcacagagttgaacattccctttgacagagcagtttggaaactctctttgtgtagaatctgcaagtggagatatggaccgctttgaggactatggtagtaaaggaaatagcttcatataaaagcaagacagtagcattctcagaaacttctttgtgatgcttgcattcaactcacagagttgaactttcctttcgagagagaagctttgaaacactctttttccagaatctgcaagtggacatttggagggctttgaggcctgtggtggaaaaggaattatcttcccgtaaaagctagatagaagcattgtcagaaacttctttgtgatgattgcattcaactcacagagttgaaggttccttttcaaagagcagtttccaatcactctttctgtggaatctgcaagtggatatttggacctattttgaagatttcgttggaaacgggagaatcttcacaggaaagctaaacagaagcattctcagaaacttctctgtgatgtttgtgttcaactcccagagtttcacattgcttttcatagagtagttctgaaacatgcttttcgtagtgtctacaagtggacatttggagtgctttcaggcctgtggtggaaaacgaattatggtcacataaaaactggagagaagccttctcagaaacttctctgtgatgattgcattcaactcacagagttgaaccctcctatggatagagcagtgttgaaactctctttttgtggaatctgcaagtggatatgtggacctctccgaagatgtctttggaaacgggaatatcttcacataaaaactaaacagaagcattctcagaaacttcttggtgatgtttacattcaaatcccagagttgaagcttcctttgatagttcaggtttgaaacactctttttgtaggatctgcaagtggatatttggaccactctgtggccttcgttcgaaacgggtacatcttcgcataaaatctagacagaagcattctcagaaaatactttgtgatgattgagtttaactcacagagctgaacattcctttggatggagcaggtttgagacacactttttgtagaatctacaagtggatatttggacctctctgaggatttcgttggaaacgggataactgcacctaactaaacggaagcattctcagaaactgctttgtgatgattgcattcacctcacagagttgaacattcctattgatagagcagtttggaaacactcttgttgtggaatgtgcaagtggagatttggagcgctttgaggcctatggtagtaaagggaatagcttcatagaaaaacaagacagatgcattctcaggaactttttggtgatgtttgtattcaactcccagagttgaactttcctttggaaagagcagctatgaaacaccctttttctagaatctgcaagtggacgtttggagggctttgtggtttgtggtggaaaaggaaatatcttcacctaaatattagatagaagcattctcagaagcttctctgtgatgactgcattcaactcaaggagttgaacactccttttgagagcgcagttttgaaactctttctgtggcatctgcaaggggacatgtagacctcttggaagatttcgttggaaacggaatcatcttcatataaaaattatacagaagcagtctcagaatcttctttgtgatgtttgcattcaaatcccagagttgaactttcctttcaaagttcacgtttgaaacactctttttgcaggatctacaagtggatatttggaccactctgtgtccttcgttcgaaacgggtatatcttcacatgacatctagacagaagctttctcagaaaattctttgggatgattgagttgagcaaacagagctgaacactccttgcgatgtagcagtttagaaacacactttctgcagaatctgcaagtgcatatgtggacctctctgaggaattcgttggaaacgggataatttcagctgactaaacagtagcattctcagaaccttcttcgtgatgtctgcattcaactcacagtgtggaacctttctttgatagttcaggtttgaaacactctttttgtagaaactgcaaggggataattgcacttctttgaggcctaccgtagtaaaggaaataacttcctatagaaagaagacagaagcattctcagaaccctcttcgtgatgtttgcattcaactcacagtgctgaacctttctttgatagttcagctttgaaacactcttcttgtagaaactgcaagtggatatttggtcctctctgaagatttcgttggaaacgggataaaccgcacagaactaaacagaagcattcacagaaaactcttggtgacgactgagtttaactcacagagctgaacattcctttggatggagcagtttcgaaacacactatttgtagaatgtgcaagtggatatttgggcctctctgaggatttcgttggaaacgggataaaccgcacagaactaaaacagaagcattctcagaaactactttgtgatgattgcattcaagtcacagagttgaacattccctttgacagagcagtttggaaactctctttgtgtagaatctgcaagtggagatatggaccgctttgaggcctatggtagtaaaggaaatagcttcatataaaagctagacagtagcattctcagaaacttctttgtgatgcttgcattcaactcacagagttgaactttcctttcgagagagaagctttgaaacactctttttccagaatctgcaagtggacatttggagggctttgaggcctgtggtggaaaaggaattaacttcccgtaaaagctagatagaagcattgtcagaaacttctttgtgatgattgcattcaactcacagagttgaaggttccttttcaaagagcagtttccaatcactctttctgtggaatctgcaagtggatatttggacctattttgaagatttcgttggaaacgggagaatcttcacaggaaagctaaacagaagcattctcagaaacttctctgtgatgtttgtgttcaactcccagagtttcacattgcttttcatagagtagttctgaaacatgcttttcgtagtgtctacaagtggacatttggagcgctttcaggcctgtggtggaaaacgaattatggtcacataaaaactggagagaagccttctcagaaacttctctgtgatgattgcattcaactcacagagttgaaccctcctatggatagagcagtgttgaaactctctttttgtggaatctgcaagtggatacgtggacctctccgaagatgtctttggaaacgggaatatcttcacataaaaactaaacagaagcattctcagaaacttcttggtgatgtttgcattcaaatcccagagttgaaccttcctttgatagttcaggtttgaaacactctttttgtaggatctgcaagtggatatttggaccactctgtggccttcgttcgaaacgggtatatcttcgcataaaatctagacagaagcattctcagaaaatactttgtgatgattgagtttaactcacagagctgaacattcctttggatggagcaggtttgagacacactttttgtagaatctacaagtggatatttggacctctctgaggatttcgttggaaacgggataactgcacctaactaaacggaagcattctcagaaactgctttgtgatgattgcattcacctcacagagttgaccattcctattgatagagcagtttggaaacactcttgttgtggaatgtgcaagtggagatttggagcgctttgaggcctatggtagtaaagggaatagcttcatagaaaaactagacagatgcattctcaggaactttttggtgatgtttctattcaactcccagagttgaactttcctttggaaagagcagctatgaaacactctttttctagaatctgcaagtggacgtttggagggctttgtggtttgtggtggaaaaggaaatatcttcacctcaatactagatagaagcattctcagaagcttctctgtgatgactgcattcaactcacggagttgaacactccttttgagagcgcagttttgaaactctgtttctgtggcatctgcaaggggacatgtagacctctttgaagatttcgttggaaacggaatcatcttcacatcaaaactatacagaagcagtctcagaatcttctttgtgatgtttgcattcaaatcccagagttgaactttcctttcaaagttcacgtttgaaacactctttttgcaggatctacaagtggatatttggaccactctgtgtccttcgttcgaaacgggtatatcttcacatgacatctagacagaagctttctcagaaaattctttgggatgattgagtggaactcacagagctgaacattccttgcgatggagcagtttagaaacacactttctgcagaatctgcaagtgcatatttggacctctctgaggaattcgttggaaacgggataatttcagctgactaaacagaagcattctcagaaccttcttcgtgatgtctgcattcaactcacagtgtggaacctttctttgatagttcaggtttgaaacactctttttgtagaaactgcaaggggataattgcacttctttgaggcctaccgtagtaaaggaaataacttcctatagaaagaagacagaagcattctcagaaccctcttcgtgatgtttgcattcaactcacggtgctgaaactttctttgatagttcagctttgaaacactctttttgtagaaactgcaagtggatatttggtcctctctgaggatttcgttggaaacgggataaaccgcacagaactaaacagaagcattctcagaaccttcttcgtgatgtttgcattcaactcacagtgttgaacctttctttgatagttcaggtttgaaacggtctttctgtagaaactgcaagtagatatttggacctctctgaggatttcgttggaaacgggataaaccgcccagaactaaaacagaagcattcacagaaaactcttggtgacgactgagtttaactcacagagctgaacattcctttggatggagcagtttcgaaacacactatttgtagaatgtgtaagtggatatgtgggcctctctgaggatttcgttggaaacgggataaaccgcacagaactaaacagaagcattctcagaaactactttgtgatgattgcattcacgtcacagagttgaacattccctttgacagagcagtttggaaactctctttgtgtagaatctgcaagtggagatatggaccgctttgaggcctatggtagtaaaggaaatagcttcatataaaagctagacagtagcattctcagaaacttctttgtgatgcttgcattcaactcacagagttgaactttcctttcgagagagaagctttgaaacactctttttccagaatctgcaagtggacctttggagggctttgatgtctgtggtggaaaaggaattatcttcccgtaaaagctagatagaagcattgtcagaaacttctttgtgatgattccattcaactcacagagttgaaggttccttttcaaacagcagtttccaaacactctttctgtggaatctgcaagtggatatttggacctctttgaagatttcgttggaaacgggataaccttcacagaaaagctaaacagaagcattctcagaaacttctctgtgatgtttgtgttcaactcccagagtgtcacattgcttctcatagagtagttctgaaacatgtttttcgtagtgtctgcaaggggacatttggagcgctttcaggactgtggtggaaaacgaattatggtcacataaaaactggagagaagccttctcagaaacttctctgtgatgattgcattcaactcacagagttgaaccctcctatggatagagcagtgttgaaactctctttttgtggaatctgcaagtggatatgtggacctctccgaagatgtctttggaaacgggactatcttcacataaaaactaaacagaagcattctcagaaacttcttggtgatgtttgcattcaaatcccagagttgaaccttcctttgatagttcaggtttgaaacactctttttgtaggatctgcaagtggatatttggaccactctgtggccttcgttcgaaacgggtacatcttcgcataaaatctagacagaagcattctcagaaaatactttgtgatgattgagtttaactcacagagctgaacattcctttggatggagcaggcttgagacacactttttgtagaatctacaagtggatattttgacctctctgaggatttcgttggaaacgggataactgcaccgaactaaacggaagcattctcagaaactgctttgtgatgattgcattcacctcacagagttgaccattcctattgatagagcagtttggaaacactcttgttgtggaatgtgcaagtggagatttggagcgctttgaggcctatggtagtaaagggaatagcttcatagaaaaactagacagatgcattctcaggaactttttggtgatgtttgtattcaactcccagagttgaactttcctttggaaagagcagctatgaaacactctttttctagaatctgcaagtggacgtttggagggctttgtggtttgtggtggaaaaggaaatatcttcacctaaatactacatagaagcattctcagaagcttctctgtgatgactgcattcaactcacggagttgaacactccttttgagagcgcagttttgaaactctctttctgtggcatctgcaaggggacatgtagacctctttgaagatttcgttggaaacggaatcatcttcacataaaaactatacagaagcagtctcagaatcttctttgtgatgtttgcattcaaatcccagagttgaactttcctttcaaagttcacgtttgaaacactctttttgcaggatctacaagtggatatttggaccactctgtgtccttcgttcgaaacgggtatatcttcacatgacatctagacagaagctttctcagaaaattctttgggatgattgagttgaactcacagagctgaacattccttgcgatggagcagtttagaaacacactttctgcagaatctgcaagtgcatatttggacctctctgaggaattcgttggaaacgggataatttcagctgactaaacagaagcattctcagaaccttcttcgtgatgtctgcattcaactcacagtgtggaacctttctttgatagttcaggtttgaaacactctttttgtagaaactgcaaggggataattgcacttctttgaggcctaccgtagtaaaggaaataacttcctatagaaagaagacagaagcattctcagaaccctcttcgtgatgtttgcattcaactcacggtgctgaatctttctttgatagttcagctttgaaacactctttttgtagaaactgcaagtggatatttggtcctctctgaggatttcgttggtaacgggataaaccgcacagaactaaacagaagcattctcagaaccttcttcgtgatgtttgcattcaactcacagtgttgaacctttctttgatagttcaggtttgaaacggtctttctgtagaaactgcaagtagatatttcgacctctctggggatttcgttggaaacgggataaaccgcacagaactaaaacagaagcattcacagaaaactcttggtgacgactgagtttaactcacagaactgaacattcctttggatggagcagtttcgaaacacactatttgtagaatgtgcaagtggatatgtgggcctctctgaggatttcgttggaaacgggataaaccgcacagaactaaacagaagcattctcagaaactactttgtgatgattgcattcaagtcacagagttgaacattccctttgacagagcagtttggaaactctctttgtgtagaatctgcaagtggagatatggaccgctttgaggcctatggtagtaaaggaaatagcttcatataaaagctagacagtagcattctcagaaacttctttgtgatgcttgcattcaactcacagagttgaactttcctttcgagagagaagctttgaaacactctttttccagaatctgcaagtggacatttggagggctttgaggcctgtggtggaaaaggaattatcttcccgtaaaagctagatagaagcattgtcagaaacttctttgtgatgattgcattcaactcacagtagttgaaggttccttttcaaagagcagtttccaatcactctttctgtggaatctgcaagtggatatttggacctattttgaagatttcgttggaaacgggagaatcttcacaggaaagctaaacagaagcattctcagaaacttctctgtgatgtttgtgttcaactcccagagttgcacattgcttttcatagagtagttctgaaacatgcttttcgtagtgtctgcaagtggacatttggagcgctttcaggcctgtggtggaaaacgaattatggtcacataaaaactggagagaagccttctcagaaacttctctgtgatgattgcattcaactcactgagttgaaccctcctatggatagagcagtgttgaaactctctttttgtggaatctgcaagtggatatgtggacctctccgaagatgtctttggaaacgggaatatcttcacataaaaactaaacagaagcattctcagaaacttcttggtgatgtttgcattcaaatcccagagttgaaccttcctttgatagttcaggtttgaaacactctttttgtaggatctgcaagtagctatttggaccactctgtggccttcgttcgaaacgggtacatcttcgcataaaatctagacagaagcattctcagaaaatactttgtgatgattgagtttaactcaaagagctgaacattcctttgggtggagcaggtttgagacacactttttgtagaatctacaagtggatatttggacctctctgaggatttcgttggaaacgggataactgcacctaactaaagggaagcattctcagaaactgctttgtgattattgcattcacctcacagagttgaacattcctattgatagagcagtttggaaacactcttgttgtggaatgtgcaagtggagatttggagcgctttgaggcctatggtagtaaagggaatagcttcatagaaaaactagacagatgcattctcaggaactttttggtgatgtttgtattcaactcccagagttgaactttcctttggaaagagcagctatgaaacactctttttctagaatctgcaagtggacgtttggagggctttgtggtttgtggtggaaaaggaaatatcttcacctaaatactagatagaagcattctcagaagcttctctgtgatgactgcattcaactcacggagttgaacactccttttgagagcgcagttttgaaactctctttctgtggcatccgcaaggggacatgtagacctctttgaagatttcgttggaaacggaatcatcttcacataaaaactatacagaagcagtctcagaatcttctttgtgatgtttgcattcaaatcccagagttgaactttcctttcaaagttcacgtttgaaacactctttttgcaggatctacaagtggatatttggaccactctgtgtccttcgttcgaaacgggtatatcttcacatgacatctagacagaagctttctcagaaaattctttgggatgattgagtggaactcacagagctgaacattccttgcgatggagcagtttagaaacacactttctgcagaatctgcaagtgcatatttggacctctctgaggaattcgttggaaacgggataatttcagctgactaaacagaagcattctcagaaccttcttcgtgatgtctgcattcaactcacagtgtggaacctttctttgatagttcaggtttgaaacactctttttgtagaaactgcaaggggataattgcacttctttgaggcctaccgtagtaaaggaaataacttcctatagaaagaagacagaagcattctcagaaccctcttcgtgatgtttgcattcaactcacagtgctgaacctttctttgatagttcagctttgaaacactcttcttgtagaaactgcaagtggatatttggtcctctctgaggatttcgttggaaacgggataaaccgcacagaactaaacagaagaattctcagagccctcttcgtgatgtttgcattcaactcacagtgctgaacctttctttgatagtgcagctttgaaacactctttttgtagaaactgcaagtggatgtttggtcctctctgaggatttcgttggaaacgggataaaccgcacagaactaaaacagaagcattcacagaaaactcttggtgacgactgagtttaactcacagagctgaacattcctttggatggagcagtttcaaaacacactatttgtagaatctgcaagtggatatgtgggcctctctgaggatttcgttggaaacgggataaaccgcacagaactaaaacagaaccattgtcagaaactactttgtgatgattgcattcaagtcacagagttcaacattccctttgacagagcagtttggaaactctctttgtgtagaatctgcaagtggagatatggaccgctttcaggcctatggtagtaaaggaaatagcttcatataaaagctagacagtagcattctcagaaacttctttgtgatgcttgcattcaactcacagagttgaactttcctttcgagagagaagctttgaaacactctttttccagaatctgcaagtggacctttggagggctttgatgtctgtggtggaaaaggaattatcttcccgtaaaagctagatagaagcattgtcagaaacttctttgtgatgattgcattcaactcacagagttgaaggttccttttcaaacagcagtttccaatcactctttctgtggaatctgcaagtggatatttgggcctctctgaggatttcgttggaaacgggataaaacgcacagaactaaaacagaagcattctcagaaacttctctgtgatgtttgtgttcaactcccagagtttcacgttgcttttcatagagtagttctgaaacatgcttttcgtagtgtctgcaagtggacatttggagcgctttcaggcctgtggtggaaaacgaattatggtcacataaaaactggagagaagccttctcagaaacttctctgtgatgattgcattcaactcacagagttgaaccctcctatggatagagcagtgttgaaactctctttttgtggaatctgcaagtggatatgtggacctctccgaagatgtctttggaaacgggaatatcttcacataaaaactaaacagaagcattctcagaaacttcttggtgatgtttgcattcaaatcccagagttgaaccttcctttgatagttcaggtttgaaacactctttttgtaggatctgcaagtggatatttggaccactctgtggccttcgttcgaaactggtatatcttcgcataaaatccagacagaagcattctcagaaaatactttgtgatgattgagtttaactcacagagctgaacattcctttggatggagcaggtttgagacacactttttgtagaatctacaagtggatatttggacctctcggaggatttcgttggaaacgggataactgcacctaactaaacggaagcattctcagaaactgctttgtgatgattgcattcacctcacagagttgaacattcctattgatagagcagtttggaaacactcttattgtggaatgtgcaagtggagatttggagcgctttgaggcctatggtagtaaagggaatagcttcatagaaaaactagacagatgcattctcaggaactttttggtgatgtttgtattcaactcccagagttgaactttcctttggaaagagcagctatgaaacactctttttctagaatctgcaagtggacgtttggagggctttgtggtttgtggtggaaaaggaaatatcttcacctaaatactagatagaagcattctcagaagcttctctgtgatgactgcattcaactcacggagttgatcactccttttgagagcgcagttttgaaactctctttctgtggcatctgcaaggggacatgtagacctctttgaagatttcgttggaaacggaatcatcttcacataaaaactatacagaagcagtctcagaatcttctttgtggtgtttgcattcaaatcccagagttgaactttcctttcaaagttcacgtttgaaacactctttttgcaggatctacaagtggatatttggaccactgctgtgtccttcgttcgaaacgggtatatcttcacatgacatctagacagaagctttctcagaaaattctttgggatgattgagtggaactcacagagctgaacattccttgcgatgtagcagtttagaaacacactttctgcagaatctgcaagtgcatatttggacctctctgaggaattcgttggaaacgggataatttcagctgactaaacagaagcattctcagaaccttcttcgtgatgtctgcattcaactcacagtgtggaacctttatttgatagttcaggtttgaaacactctttttgtagaaactgcaaggggataattgcacttctttgaggcctaccgtagtaaaggaaataacttcctataaaaagaagacagaagcattctcagaaccctcttggtgatgtttgcattcaactcacggtgctgaacctttctttgatagttcagctttgaaacactctttttgtagaaactgcaagtggatatttggtcctctctgaggatttcgttggaaacgggataaactgcacagaactaaacagaagcattctcagaaccttcttcgtgatgtttgcattcaactcacagtgttgaacctttctttgatagttcaggtttgaaacggtctttctgtggaaactgcaagtagatatttggacctctctgaggatttcgttggaaacgggataaaccgcacagaactaaaacagaagcattcacagaaaactcttggtgacgactgagtttaactcacagagctgaacattcctttggatggagcagtttcgaaacacactatttctagaaggtgcaagtggatatgtgggcctctctgaggatttcgttggaaacgggataaaccgcacagaactaaacagaagcattctcagaaactactttgtgatgattgcattcaagtcacagagttgaacattccctttgacagagcagtttggaaactctctttgtgtagaatctgcaagtggagatatggaccgctttgaggcctatggtagtaaaggaaatagcttcatataaaagctagacagtagcattctcagaaacttctttgtgatgcttgcattcaactcacagagttgaactttcctttcgagagagaagctttgaaacactctttttccagaatctgcaagtggacatttggagggctttgaggcctgtggtggaaaaggaattaacttcccgtaaaagctagatagaagcattgtcagaaacttctttgtgatgattgcattcaactcacagagttgaaggttccttttcaaacagcagtttccaatcactctttctgtggaatctgcaagtggatatttgggcctctctgaggatttcgttggaaacgggataaaacgcacagaactaaaacagaagaagcattctcagaaacttctctgtgatgtttgtgttcaactcccagagtttcacattgcttttcatagagtagttctgaaacatgcttttcgtagtgtctgcaagtggacatttggagcgctttcaggcctgtggtggaaaacgaattatggtcacataaaaactggagagaagccttctcagaaacttctctgtgatgattgcattcaactcacggagttgaaccctcctatggatagagcagtgttgaaactctctttttgtggaatctgcaagtggatatgtggacctctccgaagatgtctttggaaacgggaatatcttcacatgaaaactaaacagaagcattctcagaaacttcttggtgatgtttgcattcaaatcccagagttgaaccttcctttgatagttcaggtttgaaatactctttttgtaggatctgcaagtggatatttggaccactctgtggccttcgttcgaaacgggtacatcttcgcataaaatctagacagaagcattctcagaaaatactttgtgatgattgagtttaactcacagagctgaacattcctttggatggagcaggtttgagacacactttttgtagaatctacaagtggatatttggacctctctgaggatttcgttggaaacgcgataactgcacctaactaaacggaagcattctcagaaactgctttgtgatgattgcattcacctcacagagttgaacattcctattgatagagcagtttggaaacactcttgttgtggaatgtgcaagtggagatttggagcgctttgaggcctatggtagtaaagggaatagcttcatagaaaaactaggcagatgcattctcaggaactttttggtgatgtttgtattcaactcccagagttgaactttcctttggaaagagcagctatgaaacactctttttctagaatctgcaagtggacgtttggagggctttgtggtttgtggtggaaaaggaaatatcttcacctaaatactagatagaagcattctcagaagcttctctgtgatgactgcattcaactcacggagttgaacactccttttgagagcgcagttttggaactctctttctgtggcatctgcaaggggacatgtagacctctttgaagatttcgttggaaacggaatcatcttcacatcaaaactatacagaagcagtctcagaatcttctttgtgatgtttgcattcaaatcccagagttgaacttgcctttcaaagttcacgtttgaaacactctttttgcaggatctacaagtggatatttggaccactctgtgtccttcgttcgaaacgggtatatcttcacatgacatctagacagaagctttctcagaaaattctttgggatgattgagttgaactcacagagctgagcattccttgcgatgtagcagtttagaaacacactttctgcagaatctgcaagtgcatatttggacctctgtgaggaattcgttggaaacgggataatttcagctgactaaacagaagcattctcagaacttcttcgtgatgtctgcattcaactcacagtgtggaacctttctttgatagttcaggtttgaaacactctttctgtagaaactgcaaggggataattgcactctttgaggagtaccgtagtaaaggaaataacttcctataaaaagaagacagaagcattctcagaacactcttcgtgatgtttgcattcaactcacggtgctgaacctttctttgatagttcagctttgaaacactctttttgtagaaactgcaagtggatatttggtcctctctgaggatttcgttggaaacgggataaaccgcacagaactaaacagaagcattctcagagccctcttcgtgatgtttgcattcaactcacagtgctgaacctttctttgatagtgcagctttgaaacactctttttgtagaaactgcaagtggatatttggtcctactactgaggatttcgttggaaacgggataaaccgcacagaactaaaacagaagcattcacagaaaactcttggtgacgactgagtttaactcacagagctgaacattcctttggatggagcagtttcgaaacacactatttgtagaatctgcaagtggatatttgggcctctctgaggatttcgttggaaacgggataaaacgcacagaactaaaacagaagcattctcagaaactactttgtgatgattgcattcaagtcacagagttgaacattccctttgacagagcagtttggaaactctctttgtgtagaatctgcaagtggagatatggaccgctttgaggcctatggtagtaaaggaaagagcttcatataaaagctagacagtagcattctcagaaacttctttgtgatgcttgcattcaactcacagagttgaactttcctttcgagagagaagctttgaaacactctttttccagaatgtgcaagtggacatttggggagctttgaggcctgtggtggaaaaggaattatcttcccgtaaaagctagatagaagcattgtcagaaacttctttgtgatgattgcattcaactcacagagttgaaggttccttttcaaacagcagtttccaatcactctttctgtggaatctgcaagtggatatttgggcctctctgaggatttcgttggaaacgggataaaacgcacagaactaaaacagaaagcatactcagaaacttctctgtgatgtttgtgttcaactcccagagtttcacattgattttcatagagtagttctgaaacatgcttttcgtagtgtctgcaagtggacatttggagtgctttcaggcctgcggtggaaaacgaattatggtcacataaaaactggagagaagccttctcagaaacttctctgtgatgattgcattcaactcacagagttgaaccctcctatggatagagcagtgttgaaactctctttttgtggaatctgcaagcggatatgtggacctctccgaagatgtctttggaaacgggaatatcttcacataaaaactaaacagaagcattctcagaaacttcttggtgatgtttgcattcaaatcccagagttgaaccttcctttgatagttcaggtttgaaacactctttttgtaggatctgcaagtggctatttggaccactctgtggccttcgttcttaacgggtatatcttcgcataaaatctagacagaagcattctcagaaaatactttgtgatgattgagtttaaatcacagagctgaccattcctttggatggagcaggtttgagacacactttttgtagaatctacaagtggatatttggacctctctgaggatttcgttggaaacgggataactgcacctaactaaacggaagcattctcagaaactgctttgtgatgattgcattcacctcacagagttgaacattcctattgatagagcagtttggaaacactcttgttgtggaatgtgcaagtggagatttggagcgctttgaggcctatggtagtaaagggaatagcttcatagaaaaaattgacagatgcattctcaggaactttttggtgatgtttgtattcaactcccagagttgaactttcctttggaaagagcagctatgaaacactctttttctagaatctgcaagtggacgtttggagggctttgtggtttgtggtggaaaaggaaatatcttcacctaaatactagatagaagcattctcagaagcttctctgtgatgactgcattcaactcacggagttgaacactccttttgagagcgtagttttgaaactctctttctgtggcatctgcaaggggacatgtagacctctttgaagatttcgttggaaacggaatcatcttcacataaaaactatacagaagcagtctcagaatcttctttgtgatgtttgcattcaaatcccagagttgaactttcctttccaagttcacgtttgaaacactctttttgcaggatctacaagtggatatttggaccactctgtgtccttcgttcgaaacgggtatatcttcacatgatatctagacagaagctttctcagaaaattctttgggatgattgagttgaactcacagagctgaacattccttgcgatggagcagtttagaaacacactttctgcagaatctgcaagtgcatatttggacctctctgaggaattcgttggaaacgggataatttcagccgactaaacagaagcattctcagaaccttcttcgtgatgtctgcattcaactcacagtgtggaacctttctttgatagttcaggtttgaaacactctttctgtagaaactgcaaggggataattgcactctttgaggagtaccgtagtaaaggaaataacttcctataaaaagaagacagaagcattctcagaaccctcttcgtgatgtttgcattcaactcacagtgctgaacctttctttgatagttcagctttgaaacactctttttgtagaaactgcaagtggatatttggtcctctctgagcatttcgttggaaacgggataaactgcacagaactaaacagaagcattctcagaaccttcttcgtgatgtttgcattcaactcacagtgttgaacctttctttgatagttcaggtttgaaacggtctttctgtagaaactgcaagtagatatttggacctctctgaggatttcgttggaaacgggataacccgcacagaactaaaacagaagcattcacagaaaactcttggtgacgactgagtttaactcacagagctgaacattcctttggatggagcagtttcgaaacacactatttgtagaatgtgcaagtggatatttgggcctctctgaggatttcgttggaaacgggataaaccgcacagaactaaacagaagcattctcagaaactactttgtgatgattgcattcaagtcacagagttgaacattccctttgacagagcagtttggaaactctctttgtgtagaatctgcaagtggagatatggaccgctttgaggcctatggtagtaaaggaaatagcttcatataaaagctagacagtagcattctcagaaacttctttgtgatgcttgcattcaactcacagagttgaactttcctttcgagagagaagctttgaaacactctttttccagaatctgcaagtggacatttggagggctttgaggcctgtggtggaaaaggaattatcttcccgtaaaagctagatagaagcattgtcagaaacttctttgtgatgattgcattcaactcacagagttgaaggttccttttcaaagagcagtttccaatcactctttctgtggaatctgcaagtggatatttggacctattttgaagatttcgttggaaacgggagaatcttcacaggaaagctaaacagaagcattctcagaaacttctctgtgatgtttgtgttcaactcccagagtttcacattgcttttcatagagtagttctgaaacatgcttttcgtagtgtctacaagtggacatttggagcgctttcaggcctgtggtggaaaacgaattatggtcacataaaaactggagagaagccttctcagaaacttctctgtgatgattgcattcaactcacagagttgaaccctcctatggatagagcagtgttgaaactctctttttgtggaatctgcaagtggatatgtggacctctccgaagatgtctttggaaacgggaatatcttcacataaaaactaaacagaagcattctcagaaacttcttggtgatgtttgcattcaaatcccagagttgaaccttcctttgatagttcaggtttgaaacactctttttgtaggatctgcaagtggatatttggaccactctgtggccttcgttcgaaacgggtatatcttcgcataaaatctagacagaagcattctcagaaaatactttgtgatgattgagttaaaatcacagagctgaacattcctttggatggagcaggtttgagacacactttttgtagaatctacaagtggatatttggacctctctgaggatttcgttggaaacgggataactgcacctaactaaacggaagcattctcagaaactgctttgtgatgattgcattcacctcacagagttgaacattcctattgatagagcagtttggaaacactcttgttgtggaatgtgcaagtggagatttggagcgctttgaggtctatggtagtaaagggaatagcttcatagaaaaactagacagatgcattctcaggaactttttggtgatgtttgtattcaactcccagagttgaactttcctttggaaagagcagctatgaaacactctttttctagaatctgcaagtggacgtttggagggctttgtggtttgtggtggaaaaggaaatatcttcacctaaatactagatagaagcattctcagaagctcctctgtgatgactgcattcaactcacggagttgaacactccttttgagagcgcagttttgaaactctctttctgtggcatctgcaaggggacatgtagacctctttgaagatttcgttggaaacggaatcatcttcacataaaaactatacagaagcagtctcagaatcttctttgtgatgtttgcattcaaatcccagagttgaactttcctttcaaagttcacgtttgaaacactctttttgcaggatctacaagtggatatttggaccactctgtgtccttcgttcgaaacgggtataacttcacacgacatctagacagaagctttctcagaaaattctttgggatgattgagtggaactcacagagctgaacattccttgcgatgtagcagtttagaaacacactttctgcagaatctgcaagtgcatatttggacctctctgaggaattcgttggaaacgggataatttcagctgactaaacagaagcattctcagaaccttcttcgtgatgtctgcattcaactcacagtgtggaacctttctttgatagttcaggtttgaaacactctttttgtagaaactgcaaggggataattgcacttctttgaggcctaccgtagtaaaggaaataacttcctatagaaagaagacagaagaattctcagagccctcttcgtgatgtttgcattcaactcacagtgctgaacctttctttgatagtgcagctttgaaacactctttttgtagaaactgcaagtggatgtttggtcctctctgaggatttcgttggaaacgggataaaccgcacagaactaaaacagaagcattgtcagaaacttctttgtgatgattgcattcaactcacagagttgaaggttccttttcaaacagcagtttccaatcactctttctgtggaatctgcaagtggatatttgggcctctctgaggatttcgttggaaacgggataaaacgcacagaactaaaacagaagcattctcagaaacttctctgtgatgtttggtgttcaactcccagagtttcacgttgcttttcatagagtagttctgaaacatgcttttcgtagtgtctgcaagtggacatttggagcgctttcaggcctgtggtggaaaacgaattatggtcacataaaaactggagagaagccttctcagaaacttctctgtgatgattgcattcaactcacagagttgaaccctcctatggatagagcagtgttgaaactctctttttgtggaatctgcaagtggatatgtggacctctccgaagatgtctttggaaacgggaatatcttcacataaaaactaaacagaagcattctcagaaacttcttggtgatgtttgcattcaaatcccagagttgaatcttcctttgatagttcaggtttgaaacactctttttgtagggtctgcaagtggatatttggaccactctgtggccttcgttcgaaacgggtacatcttcgcataaaatctagacagaagcattctcagaaaatactttgtgatgatagagtttaactcacagagctgaacattcctttggatggagcaggtttgagacacactttttgtagaatctacaagtggatatttggacctctctgaggatttcgttggaaacgggataactgcacctaactaaacggaagcattctcagaaactgctttgtgatgattgcattcacctcacagagttgaacattcctattgatagagcagtttggaaacactcttgttgtggaatgtgcaagtggagatttggagcgctttgaggcctatggtagtaaagggaatagcttcatagaaaaactagacagacgcattctcaggaactttttggtgatgtttgtattcaactcccagagttgaactttcttttggaaagagcagctatgaaacactctttttctagaatctgcaagtggacgtttggagggctttgtggtttgtggtggaaaaggaaatatcttcacctaaatactagatagaagcattctcagaagcttctctgtgatgactgcattcagctcacagagttgaacactccttttgagagcgcagttttgaaactctctttctgtggcatctgcaaggggacatgtagacctctttgaagatttcgttggaaacggaatcatcttcacataaaaactatacagaagcagtctcagaatcttctttgtgatgtttgcattcaaatcccagagttgaactttcctttcaaagttcacgtttgaaacactctttttgcaggatctacaagtggatatttggaccactctgtgtccttcgttcgaaacgggtatatcttcacacgacatctagacagaagctttctcagaaaattctttgggatgattgagtggaactcacagagctgaacattccttgcgatgtagcagtttagaaacacactttctgcagaatctgcaagtgcatatttggacctctctgaggaattcgttggaaacgggataatttcagctgactaaacagaagcattctcagaaccttcttcgtgatgtctgcattcaactcacagtgtggaacctttctttgatagttcaggtttgaaacactctttttgtagaaactgcaaggggataattgcactctttgaggagtaccgtagtaaaggaaataacttcctataaaaagaagacagaagcattctcagaaccctcttcgtgatgtttgcattcaactcacagtgctgaacctttctttgatagttcagctttgaaacactctttttgtagaaactgcaagtggatatttggtcctctctgagcatttcgttggaaacgggataaactgcacagaactaaacagaagcattctcagaaccttcttcgtgatgtttgcattcaactcacagtgttgaacctttctttgatagttcaggtttgaaacggtctttctgtagaaactgcaagtagatatttggacctctctgaggatttcgttggaaacgggataaaccgcacagaactaaaacagaagcattcacagaaaactcttggtgacgactgagtttaactcacagagctgaacattcctttggatggagcagtttcgaaacacactatttgtagaatgtgcaagtggatatttgggcctctctgaggatttcgttggaaacgggataaaccgcacagaactaaacagaagcattctcagaaactactttgtgatgattgcattcaagtcacagagttgaacattccctttgacagagcagtttggaaactctctttgcgtagaatctgcaagtggagatatggaccgctttgaggcctatggtagtaaaggaaatagcttcatataaaagctagacagcagcattctcagaaacttctttgtgatgcttgcattcaactcacagagttgaactttcctttcgagagagaagctttgaaacactctttttccagaatctgcaagtggacatttggagggctttgaggcctgtggtggaaaaggaattatcttcccgtaaaagctagatagaagcattgtcagaaacttctttgtgatgattgcattcaactcacagagttgaaggttccttttcaaacagcagtttccaatcactctttctgtggaatctgcaagtggatatttgggcctctctgaggatttcgttggaaacgggataaaacgcacagaactaaaacagaagcattctcagaaacttctctgtgatgtttgtgttcaactcccagagtttcacgttgcttttcatagagtagttctgaaacatgcttttcgtagtgtctgcaagtggacatttggagcgctttcaggcctgtggtggaaaacgaattatggtcacataaaaactggagagaagccttctcagaaacttctctgtgatgattgcattcaactcacagagttgaaccctcctatggatagagcagtgttgaaactctctttttgtggaatctgcaagcaaatatgtggacctttccgaagatgtctttggcaacgggaatatcttcacataaaaactaaacagaagcattctcagaaacttcttcgtgatgtttgcattcaaatcccagagttgaaccttcctttgagagttcaggtttgaaacactctttttgtaggatctgcaagtggatatttggaccactctgtggccttcgttcgaaacgggtacatcttcgcataaaatctagacagaaagcattctcagaaaatactttgtgatgattgagttgaactcacagagctgaacattcctttggatggagcaggtttgagacacactttttgtagaatctacaagtggatatttggacctctctgaggatttcgttggaaacgggataactgcacctaactaaacggaagcattctcagaaactgctttgtgatgattgcattcacctcacagagttgaacattcctattgatagagcagtttggaaacactcttgttgtggaatgtgcaagtggagatttggagcgctttgaggcctatggtagtaaagggaatagcttcatagaaaaactagacagatgcattctcagggactttttggtgatgtttgtattcaactcccagagttgaactttcctttggaaagagcagctatgaaacactctttttctagaatctgcaagtggacgtttggagggctttgtggtttgtggtggaaaaggaaatatcttcacctaaatactagatagaagcattctcagaagcttctctgtgatgactgcattcaactcacggagttgaacactccttttgagagcgcagttttgaaactctctttctgtgtcatctgcaaggggacatgtagacctctttgaagatttcgttggaaacggaatcatcttcacataaaaactatacagaagcagtctcagaatcttctttgtgatgtttgcattcaaatcccagagttgaactttcctttcaaagttcacgtttgaaacactctttttgcaggatctacaagtggatatttggaccactctgtgtccttcgttcgaaacgggtatatcttcacaggacatctagacagaagctttctcagaaaattctttgggatgattgagtggaactcacagagctgaacattccttgcgatgtagcagtttagaaacacactttctgcagaatctgcaagtgcatatttggacctctctgaggaattcgttggaaacgggataatttcagctgactaaacagaagcattctcagaaccttcttcgtgatgtctgcattcaactcacagtgtggaacctttctttgatagttcaggtttgaaacactctttttgtagaaactgcaaggggataattgcacttctttgaggcctaccgtagtaaaggaaataacttcctatagaaagaagacagaagaattctcagagccctcttcgtgatgtttgcattcaactcacagtgctgaacctttctttgatagtgcagctttgaaacactctttttgtagaaactgcaagtggatatttggtcctctctgaggatttcgttggaaacgggataaaccgcacagaactaaaacagaagcattcacagaaaactcttggtgacgactgagtttaactcacagagctgaacattcctttggatggagcagtttcgaaacacactatttgtagaatctgcaagtggatatttgggcctctctgaggatttcgttggaaacgggataaaacgcacagaactaaaacagaagcattctcagaaactactttgtgatgattgcattcaagtcacagagttgaacattccctttgacagagcagtttggaaactctctttgtgtagaatctgcaagtggagatatggaccgctttgaggcctatggtagtaaaggaaatagcttcatataaaagctagacagtagcattctcagaaacttctttgtgatgcttgcattcaactcacagagttgaactttcctttcgagagagaagctttgaaacactctttttccagaatctgcaagtggacatttggagggctttgaggcctgtggtggaaaaggaattatcttcccgtaaaagctggatagaagcattgtcagaaacttctttgtgatgattgcattcaactcacagagttgaaggttccttttcaaacagcagtttccaaacactctttctgtggaatctgcaagtggatgtttggacctctttgaagatttcgttggaaacgggataaccttcacagaaaagctaaacagaagcattctcagaaacttctctctgatgtttgtgttcaactcccagagtttcacattgcttttcatagagtagttctgaaacatgcttttcgtagtgtctgcaagtggtcatttggagcactttcaggcctgaggtggaaaacgaattatggtcacataaaaactggagagaagccttctcagaaacttctctgtgatgattgcattcaactcacagagttgaaccctcctatggatagagcagtgttgaaactctctttttgtggaatctgcaagtggatatgtggacctctccgaagatgtctttggaaacgggaatatcttcacataaaaactaaacagaagcattctcagaaacttcttggtgatgtttgcattcaaatcccagagttgaaccttcctttgatagttcaggtttgaaacactctttttgtaggatcttcaagtggatatttggaccactctgtggccttcgttcgaaacgggtacatcttcgcataaaatctagacagaagcattctcagaaaatactttgtgatgattgagtttaactcacagagctgaacattcctttggttggagcaggtttgagacacactttttgtagaatctacaagtggatatttcgacctctctgaggatttcgttggaaacgggataactgcaccgaactaaacggaagcattctcagaaactgctttgtgatgattgcattcacctcacagagttgaacattcctattgatagagcagtttggaaacactcttgttgtggaatgtgcaagtggagatttggagcgctttgaggcctatggtagtaaagggaatagcttcatagaaaaactagacagatgcattctcaggaactttttggtgacgtttgtattcaactcccagagttgaactttcctttggaaagagcagctatgaaacactgtttttctagaatctgcaagtggacgtttggagggctttgtggtttgtggtggaaaaggaaatatcttcacctaaatactagatagaagcatcctcagaagcttctctgtgatgactgcattcaactcacggagttgaacactccttttgagagcgcagttttgaaactctctttctgtggcatctgcaaggggacatgtagacctctttgaagatttcgttggaaacggaatcatcttcacataaaaactatacagaagcagtctcagaatcttctttgtgatgtttgcattcaaatccccgagttgaactttcctttcaaagttcacgtttgaaaaactctttttgcaggatctacaagtggatatttggaccactctgtgtccttcgttcgaaacgggtatatcttcacatgacatctagacagaagctttctcagaaaattctttgggatgattgagttgaactcacagagctgagcattccttgcgatgtagcagtttagaaacacactttctgcagaatctgcaagtgcatatttggacctctgtgaggaattcgttggaaacgggataatttcagctgactaaacagaagcattctcagaaccttcttcgtgatgtctgcattcaactcacagtgtggaacctttctttgatagttcaggtttgaaacactctttttgtagaaactgcaaggggataatggcacttctttgaggcctaccgtagtaaaggaaataacttcctatagaaagaagacagaagcattctcagaaccctcttcgtgatgtttgcattcaactcacagtgctgaacctttctttgatagttcagctttgaaacactcttcttgtagaaactgcaagtggatatttggtcctctctgaggatttcgttggaaacgggataaaccgcacagaactaaacagaagcattctcagagccctcttcgagatgtttgcattcaactcacagtgctgaacctttctttgatagtgcagctttgaaacactctttttgtagaaactgcaagtggatgtttggtcctctctgaggatttcgttggaaacgggataaaccgcacagaactaaaacagaagcattcacagaaaactcttggtgacgactgagtttaactcacagagctgaacattcctttggatggagcagtttcgaaacacactatttgtagaatctgcaagtggatattggggcctctctgaggatttcgttggaaacgggataaaacgcacagaactaaaacagaagcattctcagaaactactttgtgatgattgcattcaagtcacagagttgaacattccctttgacagagcagtttggaaactctctttgtgtagaatctgcaagtggagatatggaccgctttgaggcctatggtagtaaaggaaatagcttcatataaaagctagacagtagcattctcagaaacttctttgtgatgcttgcattcaactcacagagttgaactttcctttcgagagagaagctttgaaacactctttttccagaatgtgcaagtggacatttggggagctttgaggcctgtggtggaaaaggaattatcttcccgtaaaagctagatagaagcattgtcagaaacttctttgtgatgattgcattcaactcacagagttgaaggttccttttcaaagagcagtttccaatcactctttctgtggaatctgcaagtggatatttggacctctttgaagatttcgttggaaaccggagaatcttcacagaaaagctaaacagaagcattctcagaaacttcactgtgatgtttgtgttcaactcccagagtttcacattgcttttcatagagtagttctgaaacatgcttttcgtagtgtctgcaagtggacatttggagcgctttcaggcctgtggtggaaaacgaattatggtcacataaaaactggagagaagccttctcagaaacttctctgtgatgattgcattcaactcacagagttgaaccctcctatggatagagcagtgttgaaactctctttttgtggaatctgcaagtggatatgtggacctctccgaagatgtctttggaaacgggaatatcttcacataaaaactaaacagaagcattctcagaaacttcttggtgatgtttgcattcaaatcccagagttgaaccttcctttgacagttcaggtttgaaacactctttttgtaggatctgcaagtggctatttggaccactctgtggccttcgttcgaaacgggtatatcttcgcataaaatctagacagaagcattctcagaaaatactttgtgatgattgagtttaactcacagagctgaacattcctttggatggagcaggtttgagacacactttttgtagaatctacaagtggatatttggacctctactgaggatttcgttggaaacgggataactgcacctaactaaacggaagcattctcagaaactgctttgtgatgattgcattcacctcacagagttgaccattcctattgatagagcagtttggaaacactcttgttgtggaatgtgcaagtggagatttggagcgctttgaggcctatggtagtaaagggaatagcttcatagaaaaactagacagatgcattctcaggaactttttggtgatgtttgtattcaactcccagagttgaactttcctttggaaagagcagctatgaaacactctttttctagaatctgcaagtggacgtttggagggctttgtggtttgtggtggaaaaggaaatatcttcacctaaatactagatagaagcattctcagaagcttctctgtgatgactgcattcaactcacggagttgaacactgcttttgagagcgcagttttgaaactctctttctgtggcatctgcaaggggacatgtagacctctttgaagatttcgttggaaacggaatcatcttcacatagaaactatacagaagcagtctcagaatcttctttgtgatgtttgcattcaaatcccagagttgaactttcctttcaaagttcacgtttgaaacactctttttgcaggatctacaagtggatatttggaccactctgtgtccttcgttcgaaacgggtatatcttcacatgacatctagacagaagctttctcagaaaattctttgggatgattgagttgaactcacagatctgaacattccttgcgatgtagcagtttagaaacacactttctgcagaatctgcaagtgcatatgtggacctctctgaggaattcgttggaaacgggataatttcagctgactaaacagaagcattctcagaaccttcttcgtgatgtctgcattcaactcacagtgtggaacctttctttgatagttcaggtttgaaacactctttttgtagaaactgcaaggggataattgcacttctttgaggcctaccgtagtaaaggaaataacttcctatagaaagaagacagaagcattctcagaaccctcttcgtgatgtttgcattcaactcacagtgctgaacctttctttgatagttcagctttgaaacactctttttgtagaaactgcaagtggatatttggtcctctctgaggatttcgttggaaacgggataaactgcacagaactaaacagaagcattctcagaaccttcttcgtgatgtttgcattcaactcacagtgttgaacctttctttgatagttcaggtttgaaacggtctttctgtagaaactgcaagtagatatttggacctctctgaggatttcgttggaaacgggataacccgcacagaactaaaacagaagcattcacagaaaactcttggtgacgactgagtttaactcacagagctgaacattcctttggatggagcagtttcgaaacacactatttgtagaatgtgcaagtggatatttgggcctctctgaggatttcgttggaaacgggataaaccgcacagaactaaacagaagcattctcagaaactactttgtgatgattgcattcaagtcacagagttgaacattccctttgacagagcagtttggaaactctctttctgtagaatctgcaagtggagatatggaccgctttgaggcctatggtagtaaaggaaatagcttcatataaaagctagacagtagcattctcagaaacttctttgtgatgcttgcattcaactcacagagttgaactttcctttcgagagagaagctttgaaacactctttttccagaatctgcaagtggacatttggagggctttgaggcctgtggtggaaaaggaattatcttcccgtaaaagctagatggaagcattgtcagaaacttctttgtgatgattgcattcaactcacagagttgaaggttccttttcaaagagcagtttccaatcactctttgtgtggaatctgcaagtggatatttggacctattttgaagatttcgttggaaacgggagaatcttcacaggaaagctaaacagaagcattctcagaaacttctctgtgatgtttgtgttcaactcccagagtttcacattgcttttcatagagtagttctgaaacatgcttttcgtagtgtctacaagtggacatttggagcgctttcaggcctgtggtggaaaacgaattatggtcacataaaaactggagagaagccttctcagaaacttctctgtgatgattgcattcaactcacagagttgaaccctcctatggatagagcagtgttgaaactctctttttgtggaatctgcaagtggatatgtggacctctccgaagatgtctttggaaacgggaatatcttcacataaaaactaaacagaagcattctcagaaacttcttggtgatgtttgcattcaaatcccagagttgaaccttcctttgatagttcaggtttgaaacactctttttgtaggatctgcaagtggatatttggaccactctgtggccttcgttcgaaacgggtatatcttcgcataaaatctagacagaagcattctcagaaaatacttcgtgatgattgagtttaactcacagagctgaacattcctttggatggagcaggtttgagacacactttttgtagaatctacaagtggatatttggacctctctgaggatttcgttggaaacgggataactgcacctaactaaacggaagcattctcagaaactgctttgtgatgattgcattcacctcacagagttgaacattcctattgatagagcagtttggaaacactcttgttgtggaatgtgcaagtggagatttggagcgctttgaggcctgtggtagtaaagggaatagcttcatagaaaaactagacagatgcattctcaggaactttttggtgatgtttgtattcaactcccagagttgaactttcctttggaaagagcagctatgaaacactctttttctagaatctgcaagtggacgtttggagggctttgtggtttgtggtggaaaaggaaatatcttcacctaaatactagacagaagcattctcagaagcttctctgtgatgactgcattcaactcacggagttgaacactccttttgagagcgcagttttgaaactctctttctgtggcatctgcaaggggacatgtagacctctttgaagatttcgttggaaacggaatcatcttcacataaaaactatacagaagcagtctcagaatcttctttgtgatgtttgcattcaaatcccagagttgaactttcctttcaaagttcacgtttgaaacactctttttgcaggatctacaagtggatatttggaccactctgtgtccttcgttcgaaacgggtatatcttcacatgacatctagacagaagctttctcagaaaattctttgggatgattgagttgaactcacagagctgagcattccttgcgatgtagcagtttagaaacacactttctgcagaatctgcaagtgcatatttggacctctgtgaggaattcgttggaaacgggataatttcagctgactaaacagaagcattctcagaaccttcttcgtgatgtctgcattcaactcacagtgtggaacctttctttgatagttcaggtttgaaacactctttttgtagaaactgcaagggtataactgcacttctttgaggcctaccgtagtaaaggaaataacttcctataaaaagaagacagaagcattctcagaaccctcttcgtgatgtttgcattaaactcacagtgctgaacgtttctttgatacttcagctttgaaacactctttttgtagaaactgcaagtggatatttggtcctctctgaggatttctttggaaacgggataaaccgcacagaactaaacagaaacattctcagaaccctcttcgtgatgtttgcattcaattcacggtgctgaacctttctttgatagttcagctttgaaacactctttttgtagaaactgcaagtggatatttggtcctctctgaggatttcgttggaaacgggataaaccgcacagaactaaaacagaagcattctcagaaccttcttcgtgatgtttgcattcaactcacagtgttgaacctttctttgatagttcaggtttgaaacggtctttctgtagaaactgcaagtagatatttggacctctctgaggatttcgttggaaacgggataaaccgcacagaactaaaacagaagcattcacagaaaactcttggtgacgactgagtttaactcacagagctgaacatccctttggatggagcagtttcgaaacacactatttgtagaatgtgcaagtggatattggggcctctctgaggatttcgttggaaacgggataaaccgcacagaattaaacagaagcattctcagaaattactttggatgattgcattcaagtcacagagttgaacattccctttgacagagcagtttggaaactctctttgtgtagaatctgcaagtggagatatggaccgctttgaggcctatggtagtaaaggaaatagcttcatataaaagctagacagtagcattctcagaaacttctttgtgatgcttgcattcaactcacagagttgaacttttctttcgagagagaagctttgaaacactctttttccagaatctgcaagtggacatttggagggctttgaggcgtgtggtggcaaaggaattatcttcccgtaaaagctagatagaagcattgtcagaaacttctttgtgatgattgcgttcaactcacagagttgaaggttccttttcaaacagcagtttccaaccactctttctgtggaatccgcaagtggatatttggacctctttgaagatttctttggaaacgggagaatgttcacagaaaagctaaacagaagcattctcagaaacttctctgtgatgtttgtgttcaactcccagagtttcacgttgcttttcatagagtagttctgaaacatgcttttcgtagtgtctgcaagtggacatttggagcgctttcaggcctgtggtggaaaacgaattatggtcacataaaaactggagagaagccttctcagaaacttctctgtgatgattgcattcaactcacagagttgaaccctcctatggatagagcagtgttgaaactctctttttgtggaatctgcaagtggatatgtggacctctccgaagatgtctttggaaacgggaatatcttcacataaaaactaaacagaagcattctcagaaacttcttggtgatgtttgcattcaaatcccagagttgaaccttcctttgatagttcaggtttgaaacactctttttgtaggatctgcaagtggctatttggaccactctgtggccttcgttcttaacgggtatatcttcgcataaaatctagacagaagcattctcagaaaatactttgtgatgattgagtttaaatcacagagctgaccattcctttggatggagcaggtttgagacacactttttgtagaatctacaagtggatatttggacctctctgaggatttcgttggaaacgggataactgcacctaactaaacggaagcattctcagaaactgctttgtgatgattgcattcacctcacagagttgaacattcctattgatagagcagtttggaaacactcttgttgtggaatgtgcaagtggagatttggagcgctttgaggcctatggtagtaaagggaatagcttcatagaaaaacttagacagatgcattctcaggaactttttggtgatgtttgtattcaactcccagagttgaactttcctttggaaagagcagctatgaaacactctttttctagaatctgcaagtggacgtttggagggctttgtggtttgtggtggaaaaggaaatatcttcacctaaatactagatagaagctttctcagaagcttctctgtgatgactgcattcaactcacggagttgaacactccttttgagagcgcagttttgaaactccctttctgtggcatctgcaaggggacatgtagacctctttgaagatttcgttggaaacggaatcatcttcacataaaaactatacagaagtagtctcagaatcttctttgtgatgtttgcattcaaatcccagagttgaactttcctttcaaagttcacgtttgaaacactctttttgcaggatctacaagtggatatttggaccactctgtgtccttcgttcgaaacgggtatatcttcacacgacatctagacagaagctttctcagaaaattctttgggatgattgagttgaactcacagagctgaacattccttgcgatgtagcagtttagaaacacactttctgcagaatctgcaagtgcatatttggacctctcagagtaattcgttggaaacgggataatttcagctgactaaacagaagcattctcagaaccttcttcgtgatgtctgcattcaactcacagtgtggaacctttctttgatagttcaggtttgaaacactctttttgtagaaactgcaaggggataattacacttctttgaggcctaccgtagtaaaggaaataacttcctataaaaagaagacagaagcattctcagaaccctcttcgtgatgtttgcattcaactcacagtgctgaacctttctttgatagttcagctttgaaacactcttcttgtagaaactgcaagtggatatttggtcctctctgaggatttcgttggaaacgggataaaccgcacagaactaaacagaagcattctcagaaccttcttcgtgatgtttgcattcaactcacagtgttgaacctttctttgatagttcaggtttgaaacggtctttctgaagaaactgcaagtagatatttggacctctctgaggatttcgttggaaacgggataaaccgcacagaactaaaacagaagcattcacagaaaactcttggtgacgactgagtttaactcacagagctgaacattcctttggatggagcagtttcgaaacacactatttgtagaatgtgcaagtggatattggggcctctctgaggatttcgttggaaacgggataaaccgcagagaactaaacagaagcattctcagaaactactttgtgatgattgcattcaagtcacagagttgaacattccctttgacagagcagtttggaaactctctttgtgtagaatctgcaagtggagatatggaccgctttgaggcctatggtagtaaaggaaatagcttcatataaaagctagacagtagcattctcagaaacttctttgtgatgcttgcattcaactcacagagttgaactttcctttcgagagagaagctttgaaacactctttttccagaatgtgcaagtggacatttggggagctttgaggcctgtggagggaaaggaattatcttcccgtaaaagctagatagaagcattgtcagaaacttctttgtgatgattgcattcaactcacagagttgaaggttccttttcaaacagcagtttccaatcactctttctgtggaatctgcaagtggatatttcgacctctttgaagatttcgttggaaacgggagaatcttcacagaaaagctaaacagaagcattctcagaaacttctctgtgatgtttgtgttcaactcccagagtttcacgttgcttttcatagagtagttctgaaacatgcttttcgtagtgtctgcaagtggacatttggagcgctttcaggcctgtggtggaaaacgaattatggtcacataaaaactggagagaagccttctcagaaacttctctgtgatgattgcattcaactcacagagttgaaccctcctatggatagagcagtgttgaaactctctttttgtggaatctgcaagtggatatgtggacctctccgaagatgtctttggaaacgggaatatcttcacataaaaactaaacagaagcattctcagaaacttcttggtgatgtttgcattcaaatcccagagttgaaccttcctttgatagttcaggtttgaaacactctttttgtaggatctgcaagtggatatttggaccactctgtggccttcgttcgaaacgattacatcttcgcataaaatctagacagaagcattctcagaaaatactttgtgatgattgagttgaactcacagagctgaacattcctttggatggagcaggtttgagacacactttttgtagaatctacaagtggatatttggacctctctgaggatttcgttggaaacgggataactgcacctaaataaacggaagcattctcagaaactgctttgtgatgattgcattcacctcacagagttgaacattcctattgatagagcagtttggaaacactcttgttgtggaatgtgcaagtggagatttggagcgctttgaggcctatggtagtaaagggaatagcttcatagaaaaactagacagatgcattctcaggtaactttttggtgatgtttgtattcaactcccagagttgaactttcctttggaaagagcagctatgaaacactctttttctagaatctgcaagtggacgtttggagggctttgtggtttgtggtggaaaaggaaatatcttcacctaaatactagatagaagcattctcagaagcttctctgtgatgactgcattcaactcacggagttgaacactccttttgagagcgcagttttgaaactctctttctgtggcatctgcaaggggacatgtagacctctttgaagatttcgttggaaacggaatcatcttcacataaaaactatacagaagcagtctgagaatcttctttgtgatgtttgcattcaaatcccagagttgaactttcctttcaaagttcacgtttgaaacactctttttgcaggatctacaagtggatatttggaccactctgtgtccttcgttcgaaacgggtatatcttcacatgacatctagacagaagctttctcaggaaaattctttgggatgattgagtggaactcacagtgctgaacattccttgcgatgtagcagtttagaaacacactttctgcagaatctgcaagtgcatatttggacctctctgaggaattcgttggaaacgggataatttcagctgactaaacagaaacattctcagaaccttcttcgtgatgtctgcattcaactcacagtgtggaacctttctttgatagttcaggtttgaaacactctttttgtagaaacttcaaggggataattgcacttctttgaggcctaccgtagtaaaggaaataacttcctatagaaagaagacagaagaattctcagagccctcttcgtgatgtttgcattcaactcacagtgctgaacctttctttgatagtgcagctttgaaacactctttttgtagaaactgcaagtggatgtttggtcctctctgaggatttcgttggaaacgggataaaccgcacagaactaaaacagaagcattgtcagaaacttctttgtgatgattgcattcaactcacagagttgaaggttccttttcaaacagcactttccaatcactctttttgtggaatctgcaagtggatatttgggcctctctgaggatttcgttggaaacgggataaaccgcacagaactaaaacagaagcattctcagaaacttctctgtgatgtttgtgttcaactcccagagtttcacgttgcttttcatagagtagttctgaaacatgcttttcgtagtgtctgcaagtggacatttggagcgctttcaggcctgtggtggaaaacgaattatggtcacataaaaactggagagaagccttctcagaaacttctctgtgatgattgcattcaactcacagagttgaaccctcctatggatagagcagtgttgaaactctctttttgtggaatctgcaagtggatatgtggacctctccgaagatgtctttggaaacgggaatatcttcacataaaaactaaacagaagcattctcagaaacttcttggtgatgtttgcattcaaatcccagagttgaaacttcctttgataggtcagatttgaaacactctttctgtacgatctgcaagtggatatttggaccactctgtggccttcgttcgaaacgggtacatcttcgcataaaatctagacagaagcattctcagaaaattctttgtgatgattgagtttaactcacagagctgaacattcctttggatggaccacgtttgagacacactttttgtagaatctacaagtggatatttagacctctctgaggatttcgttggaaacggtataactgcacctaactaaacggaagcattctcagaaactgctttgtgatgattgcattcacctcacagagttgaacattcctattgatagagcagtttggaaacactcttcatgtggaatgtgcaagtggagatttggagcgctttgaggcctatggtagtaaagggaatagcttcatagaaaaactagacagatgcattctcaggaactttttggtgatgtttgtattcaactcccagagttgaactttcctttggaaagagcagctatgaaacactctttttctagaatctgcaagtggacgtttggagggctttgtggtttgtggtggaaaaggaaatatcttcacctaaatactagatagaagcattctcagaagcttctctgtgatgactgcattcaactcacggagttgaacactccttttgagagcgcagttttgaaaatctctttctgtggcatctgcaaggggacatgtagacctctttgaagatttcgttggaaacggaatcatcttcacataaaaactatacagaagcagtctcagaatcttctttgtgatgtttgcattcaaatcccagagttgaactttcctttcaaagttcacgtttgaaacactctttttgcaggatctacaagtggatatttggaccaatcagtgtccttcgttcgaaacgggtatatcttcacatgacatctagatagaagctttctcagaaaattctttgggatgattgagttgaactcacagagctgaacattccctgtgatgttgcagtttagaaacacactttctgcagaatctgcaagtgcatatttggacctctctgaggaattcgttggaaacgggataatttcagctgactaaacagaagcattctcagaaccttcttcgtgatgtctgcattcaactcacagtgtggaacctttctttgatagttcaggtttgaaacactctttttgtagaaactgcaaggggataattgcacttctttgaggcctaccgtagtaaaggaaataacttcctataaaaagaagacagaagcattctcagaaccctcttcgtgatgtttgcattcaactcacagtgctgaacctttctttgatagttcagctttgaaacactctttttgtagaaactgcaggtggatatttggtcctctctgaggatttcgttggaaacgggataaaccgcacagaactaaacagaagcattctcagaaccttcttcgtgatgtttgcattcaactcacagtgttgaacctttctttgatagttcaggtttgaaacggtctttctgtagaaactgcaagtagatatttggagctctctgaggatttcgttggaaacgggataaaccgcacagaactaaaacagaagcattcacagaaaactcttggagacgactgagtttaactcacagagctgaacattcctttggatggagcagtttcgaaacacactatttgtagaatgtgcaagtggatatgtgggcctctctgaggatttcgttggaaacgggataaaccgcacagaactaaacagaagcattctcagaaactactttgtgatgattgcattcaagtcacagagttgaacattccctttgacagagcagtttggaaactctctttgtgtagaatctgcaagtggagatatggaccgctttgaggcctatggtagtaaaggaaatagcttcatataaaagctagacagtagcattctcagaaacttctttgtgatgcttgcattcaactcacagagttgaactttcctttcgagagagaagctttgaaacactctttttccagaatctgcaagtggacatttggagggctttgaggcctgtggtggaaaaggaattatcttcccgtaaaagctagatagaagcattgtcagaaacttctttgtgatgattgcattcaactcacagagttgaaggttccttttcaaacagcagtttccaatcactctttctgtggaatctgcaagtggatatttgggcctctctgaggatttcgttggaaacgggataaaacgcacagaactaaaacagaagcattctcagaaacttctctgtgatgtttgtgttcaactcccagagtttcacattgcttttcatagagtagttctgaaacatgcttttcgtagtgtctgcaagtggacatttggagcgctttcaggcctgtggtggaaaacgaattatggtcccataaaaactggagagaagccttctcagaaacttctctgtgatgattgcatttcaactcacagagttgaaccctcctatggatagagcagtgttgaaactctctttttgtggaatctgcaagtggctatgtggacctctccgaagatgtctttggaaacgggaatatcttcacataaaaactaaacagaagcattctcagaaacttcttggggatgtttgcattcaaatcccagagttgaaccttcctttgatagttcaggtttgaaacactctttttgtaggatctgcaagtggctatttggaccactctttggccttcgttcgaaactggtatatcttcgcataaaatctagacagaagcattctcagaaaatactttgtgatgattgagttaaaatcacagagctgaacattcctttggatggagcaggtttgagacacactttttgtagaatctacaagtggatatttggacctctctgaggatttcgttggaaacgggataactgcacctaactaaacggaagcattctcagaaactgctttgtgatgattgcattcacctcacagagttgaacattcctattgatagagcagtttggaaacactcttgttgtggaatgtgcaagtggagatttggagcgctttgaggcctatggtagtaaagggaatagcttcatagaaaaactagacagatgcattctcaggaactttttggtgatgtttgtgttcaactcccagagttgaactttcctttggaaagagcagctatgaaacactctttttctagaatctgcaagtggacgtttggagggctttgtggtttgtggtggaaaaggaaatatcttcacctaaatactagatagaagcattctcagaagcttctctgtgatgactgcattcaactcacggagttgaacactccttttgagagcgcagttttgaaactctctttctgtggcatctgcaaggggacatgtagacctcttggaagatttcgttggaaacggaatcatcttcacatcaaaactatacagaagtagtctcagaatcttctttgtgatgtttgcattcaaatcccagagttgaactttcctttcaaagttcacgtttgaaacactctttttgcaggatctacaagtggatatttggaccactctgtgtccttcgttcgaaacgggtatatcttcacacgacatctaggcagaagctttctcagaaaattctttgggatgattgagtggaactcacagagctgaacattccttgcgatgtagcagtttagaaacacactttctgcagaatctgcaagtgcatatttggacctctctgaggaattcgttggaaacgggataatttcagctgactaaacagaagcattctcagaaccttcttcgtgatgtctgcattcaactcacagtgtggaacctttctttgatagttcaggtttgaaacactctttttgtagaaactgcaaggggataattgcactctttgaggagtaccgtagtaaaggaaataacttcctataaaaagaagacagaagcattctcagaaccctcttcgtgatgtttgcattcaactcacagtgctgaacctttctttgatagttcagctttgaaacactctttttgtagaaactgcaagtggatatttggtcctctctgaggatttcgttggaaacgggataaactgcacagaactaaacagaagcattctcagaaccttcttcgtgatgtttgcattcaactcacagtgttgaacctttctttgatagttcaggtttgaaacggtctttctgtagaaactgcaagtagatatttggacctctctgaggatttcgttggaaacgggataacccgcacagaactaaaacagaagcattcacagaaaactcttggtgacgactgagtttaactcacagagctgaacattcctttggatggagcagtttcgaaacacactatttgtagaatgtgcaagtggatatttaggcctctctgaggatttcgttggaaacgggataaaccgcacagaactaaacagaagcattctcagaaactactttgtgatgattgcattcaagtcacagagttgaacattccctttgacagagcagtttggaaactctctttgtgtagaatctccaagtggagatatggaccgctttgaggcctatggtagtaaaggaaatagcttcatataaaagctagacagtagcattctcagaaacttctttgtgatgcttgcattcaactcacagagttgaactttcctttcgagagagaagctttgaaacactctttttccagaatctgcaagtggacatttggagggctttgaggcctgtggtggaaaaggaattaacttcccgtaaaagctagatagaagcattgtcagaaacttctttgtgatgattgcattcaactcacagagttgaaggttccttttcaaacagcagtttccaatcactctttctgtggaatctgcaagtggatatttggacctctttgaagatttcgttggaaacgggagaatcttcacagaaaagctaaacagaagcattctcagaaacttctctgtgatgtttgtgttcaactcccagagtttcacgttgcttttcatagagtagttctgaaacatgcttttcgtagtgtctgcaagtggacatttggagcgctttcaggcctgtggtggaaaacgaattatggtcacataaaaactggagagaagccttctcagaaacttctctgtgatgattgcattcaactcacagagttgaaccctcctatggatagagcagtgttgaaactctctttttgtggaatctgcaagtggatatgtggacctctccgaagatgtctttggaaacgggaatatcttcacataaaaactaaacagaagcattctcagtaaacttcttggtgatgtttgcattcaaatcccagagttgaaccttcctttgagagttcaggtttgaaacactctttttgtaggatctgcaagtggatatttggaccactctgtggccttcgttcgaaacgggtacatcttcgcataaaatctagacagaagcattctcagaaaatactttgtgatgattgagtttaaatcacagagctgaccattcctttggatggagcaggtttgagacacactttttgtagaatctacaagtggatatttggaccctctctgaggatttcgttggaaacgggataactgcacctaactaaacggaagcattctcagaaactgctttgtgatgattgcattcacctcacagagttgaacattcctattgatagagcagtttggaaacactcttgttgtggaatgtgcaagtggagatttggagcgctttgaggcctatggtagtaaagggaatagcttcatagaaaaactagacagatgcattctcaggaactttttggtgatgtttgtattcaactcccagagttgaactttcctttggaaagagcagctatgaaacactctttttctagaatctgcaagtggacgtttggagggctttgtggtttgtggtggaaaaggaaatatcttcacctaaatactagatagaagcattctcagaagcttctctgtgatgactgcattcaactcacggagttgaacactccttttgagagcgcagttttgaaactctctttctgtggcatctgcaaggggacatgttgacctctttgaagatttcgttggaaacggaatcatcttcacataaaaactatacagaagcagtctcagaatcttctttgtgatgtttgcattcaaatcccagagttgaactttcctttcaaagttcacgtttgaaacactctttttgcaggatctacaagtggatatttggaccactctgtgtccttcgttcgaaacgggtatatcttcacacgacatctagacagaagctttctcagaaaattctttgggatgattgagttgaactcacagagctgagcattccttgcgatgtagcagtttagaaacacactttctgcagaatctgcaagtgcatatttggacctctgtgaggaattcgttggaaacgggataatttcagctgactaaacagaagcattctcagaaccttcttcgtgatgtctgcattcaactcacagtgtggaacctttctttgatagttcaggtttgaaacactctttttgtggaaactgcaaggggataattgcacttctttgaggcctaccgtagtaaaggaaataacttcctataaaaagaagacagaagcattctcagaaccctcttcgtgatgtttgcattcaactcacagtgctgaacctttctttgatagttcagctttgaaacactcttcttgtagaaactgcaagtggatatttggtcctctctgaggatttcgttggaaacgggataaaccgcacagaactaaacagaagaattctcagagcccttttcgtgatgtttgcattcaactcacagtgctgaacctttctttgatagtgcagctttgaaacactctttttgtagaaactgcaagtggatatttggtcctctctgaggatttcgttggaaacgggataaaccgcacagaactaaaacagaagtattctctaaaccttcttcgtgatgtttgcattcaactcacagtgttgaacctttctttgatagttcaggtttgaaacggtctttctgtggaaactgcaagtagatattttgacctctctgaggatttcgttggaaacaggataaaccgcacagaactaaaacagaagcattcacagaaaactcttggtgacgactgagtttaactcacagagctggacattcctttggatggagcagtttcgaaacacactatttgtagaatgtgcaagtggatatttgggcctctctgaggatttcgttggaaacgggataaatggcaaagaaataaacagaagcattctcagaaactactttgtgatgattgcattcaagtcacagagttgaacattccctttgacagagaagtttggaaactctctttgtgtagaatctgcaagtggagatatggaccgctttgaggcctatggtagtaaaggaaatagcttcatataaaagctagacagtagcattctcagaaacttctttgtgatgcttgcattcaactcacagagttgaactttcctttcgagagagaagctttgaaacactctttttccagaatctgcaagtggacatttggagggctttgaggtctgtggtggaaaaggaattatcttcccgtaaaagctagatagaagcattgtcagaaacttctttgtgatgattgcattcaagtcacagagttgaaggttccttttcaaagagcagtttccaatcactctttctgtggaatctgcaagtggatatttggacctctttgaagatttcgttggaaacgggagaatcttcacagaaaagctaaacagaagcattctcagaaacttctctgtgatgtttgtgttcaactcccagagattcacattgcttctcatagagtagttctgaaacatgcttttcgtagtgtctgcaagtggacatttgcagcgctttcaggcctgtggtggaaaacgaattatggtcacataaaaactggagagaagccttctcagaaacttctctgtgatgattgcattcaactcacagagttgaaccctcctatggatagagcagtgttgaaactctctttttgtggaacctgcaagtggatatgtggacctctccgaagatgtctttggaaacgggaatatcttcacataaaaactaaacagaagcattctcagaaacttcttggtgatgtttgcattcaaatcccagagttgaaccttcctttgatagttcaggtttgaaacactctttctgtaggatctgcaagtggctatttggaccactctgtggccttcgttcgaaacgggtatatcttcgcataaaatctagacagaaagcattctcagaaaatactttgtgatgattgagtttaaatcacagagctgaccattcctttggatggagcaggtttgagacacactttttgtagaatctacaagtggatatttggacctctctgaggatttcgttggaaacgggataactgcacctaactaaacggagcattctcagaaactgctttgtgatgattgcattcacctcacagagttgaacattcctattgatagagcagtttggaaacactcttgttgtggaatgtgcaagtggagatttggagcgctttgaggcctgtggaagtaaagggaatagcttcatagaaaaactagacagatgcattctcaggaactttttggtgatgtttgtattcaactcccagagttgaactttcctttggaaagagcagctatgaaacactctttttctagaatctgcaagtggacgtttggagggctttgtggtttgtggtggaaaaggaaatatcttcacctaaatactagatagaagcattctcagaagcttctctgtgatgactgcattcaactcacggagttgaacactccttttgagagcgcagttttgaaactctctttctgtggcatctgcaaggggacatgtagacctctttgaagatttcgttggaaacggaatcatcttcacataaaaactatacagaagcagtctcagaatcttctttgtgatgtttgcattcaaatcccagagttgaactttcctttcaaagttcacgtttgaaacactctttttgcaggatctacaagtggatatttggaccactctgtgtccttcgttcgaaacgggtatatcttcacacgacatctagacagaagctttctcagaaaattctttgggatgattgagtggaactcacagagctgaacattccttgcgatgtagcagtttagaaacacactttctgcagaatctgcaagtgcatatttggacctctctgaggaattcgttggaaacgggataatttcagctgactaaacagaagcattctcagaaccttcttcgtgatgtctgcattcaactcacagtgtggaacctttctttgatagttcaggtttgaaacactctttttgtagaaactgcaaggggataattgcactctttgaggagtaccgtagtaaaggaaataacttcctataaaaagaagacagaagcattctcagaaccctcttcgtgatgtttgcattcaactcacagtgctgaacctttctttgatagttcagctttgaaacactctttttgtagaaactgcaagtggatatttggtcctctctgaggatttcgttggaaacgggataaactgcacagaactaaacagaagcattctcagaaccttcttcgtgatgtttgcattcaactcacagtgttgaacctttctttgatagttcaggtttgaaacggtctttctgtagaaactgcaagtagatatttggacctctctgaggatttcgttggaaacgggataacccgcacagaactaaaacagaagcattcacagaaaactcttggtgacgactgagtttaactcacagagctgaacattcctttggatggagcagtttcgaaacacactatttgtagaatctgcaagtggatatttgggcctctctgaggatttcgttggaaacgggataaaacgcacagaactaaaacagaagcattctcagaaactactttgtgattattgcattcaagtcacagagttgaacattccctttgacagagcagtttggaaactctctttgtgtagaatctgcaagtggagatatggaccgctttgaggcctatggtagtaaaggaaatagcttcatataaaagctagacagtagcattctcagaaacttctttgtgatgcttgcattcaactcacagagttgaactttcctttcgagagagaagctttgaaacactctttttccagaatgtgcaagtggacatttggggagctttgaggcctgtggaggaaaaggaattatcttcccgtaaaagctagatagaagcattgtcagaaacttctttgtgatgattgcattcaactcacagagttgaaggttccttttcaaagagcagtttccaatcactctttctgtggaatctgcaagtggatatttggacctattttgaagatttcgttggaaacgggagaatcttcacaggaaagctaaacagaagcattctcagaaacttctctgtgatgtttgtgttcaactcccagagtttcacattgcttttcatagagtagttctgaaacatgcttttcgtagtgtctacaagtggacatttggagcgctttcaggcctgtggtggaaaacgaattatggtcacataaaaactggagagaagccttctcagaaacttctctgtgatgattgcattcaactcacagagttgaaccctcctatggatagagcagtgttgaaactctctttttgtggaatctgcaagtggatatgtggacctctccgaagatgtctttggaaacgggaatatcttcacataaaaactaaacagaagcattctcagaaacttcttggtgatgtttgcattcaaatcccagagttgaaccttcctttgatagttcaggtttgaaacactctttttgtaggatctgcaagtggatatttggaccactctgtggccttcgttcgaaacgggtatatcttcgcataaaatccagacagaagcattctcagaaaatactttgtgatgattgagtttaactcacagagctgaacattcctttggatggagcaggtttgagacacactttttgtagaatctacaagtggatatttggacctctctgaggatttcgttggaaacgcgataactgcacctaactaaacggaagcattctcagaaactgctttgtgatgattgcattcacctcacagagttgaacattcctattgatagagcagtttggaaacactcttgttgtggaatgtgcaagtggagatttggagcgctttgaggcctatggtagtaaagggaatagcttcatagaaaaactagacagatgcattctcaggaaactttttggtgatgtttgtattcaactcccagagttgaactttcctttggaaagagcagctatgaaacactgtttttctagaatctgcaagtggacgtttggagggctttgtggtttgtggtggaaaaggaaatatcttcacctaaatactagatagaagcatcctcagaagcttctctgtgatgactgcattcaactcacggagttgaacactccttttgagagcgcagttttgaaactctctttctgtggcatctgcaaggggacatgtagacctctttgaagatttcgttggaaacggaatcatcttcacataaaaactatacagaagcagtctcagaatcttctttgtgatgtttgcattcaaatccccgagttgaactttcctttcaaagttcacgtttgaaacactctttttgcaggatctacaagtggatatttggaccactctgtgtacgtcgttcgaaacgggtatatcttcacatgacatctagacagaagctttctcagaaaattctttgggatgattgagttgaactcacagagctgagcattccttgcgatgtagcagtttagaaacacactttctgcagaatctgcaagtgcatatttggacctctgtgaggaattcgttggaaacgggataatttcagctgactaaacagaagcattctcagaaccttcttcgtgatgtctgcattcaactcacagtgtggaacctttctttgatagttcaggtttgaaacactctttttgtagaaactgcaaggggataattgcacttctttgaggcctaccgtagtaaaggaaataacttcctatagaaagaagacagaagaattctcagagccctcttcgtggtgtttgcattcaactcacagtgctgaacctttctttgatagtgcagctttgaaacactctttttgtagaaactgcaagtggatatttggtcctctctgaggatttcgttggaaacgggataaaccgcacagaactaaaacagaagcattcacagaaaactcttggtgacgactgagtttaactcacagagctgaacattccgttggatggagcagtttcgaaacacactatttgtagaatctgcaagtggatatttgggcctctctgaggatttcgttggaaacgggataaaacgcacagaactaaaacagaagcattctcagaaactactttgtgatgattgcattcaagtcacagagttgaacattccctttgacagagcagtttggaaactctctttgtgtagaatctgcaagtggagatatggaccgctttgaggcctatggtagtaaaggaaatagcttcatataaaagctagacagtagcattctcagaaacttctttgtgatgcttgcattcaactcacagagttgaactttcctttcgagagagaagctttgaaacactctttttccagaatctgcaagtggacatttggagggctttgaggcctgtggtggaaaaggaattatcttcccgtaaaagctagatagaagcattgtcagaaacttctttgtgatgattgcattcaactcacagagttgaaggttccttttcaaagagcagtttccaatcactctttctgtggaatctgcaagtggatatttggacctattttgaagatttcgttggaaacgggagaatcttcacaggaaagctaaacagaagcattctcagaaacttctctgtgatgtttgtgttcaactcccagagtttcacattgcttttcatagagtagttctgaaacatgcttttcgtagtgtctacaagtggacatttggagcgctttcaggcctgtggtggaaaacgaattatggtcacataaaaactggagagaaagccttctcagaaacttctctgtgatgattgcattcaactcacagagttgaaccctcctatggatagagcagtgttgaaactctctttttgtggaatctgcaagtggatatgtggacctctccgaagatgtctttggaaacgggaatatcttcacataaaaactaaacagagcattctcagaaacttcttggtgatgtttgcattcaaatcccagagttgaaccttcctttgatagttcaggtttgaaacactctttctgtaggatctgcaagtggctatttggaccactctgtggccttcgttcgaaacgggtatatcttcgcataaaatctagacagaagcattctcagaaaatactttgtgatgattgagtttaactcacagagctgaacattcctttggatggagcaggtttgagacacaccttttgtagaatctacaagtggatatttggacctctctgaggatttcgttggaaacgggataactgcacctaactaaacggaaagcattctcagaaactgctttgtgatgattgcattcacctcacagagttgaacattcctattgatagagcagtttggaaacactcttgttgtggaatgtgcaagtggagatttggagcgctttgaggcctatggtagtaaagggaatagcttcatagaaaaactagacagtgcattctcaggaactttttggtgatgtttgtattcaactcccagagttgaactttcctttggaaagagcagctatgaaacactctttttctagaatctgcaagtggacgtttggagggctttgtggtttgtggtggaaaaggaaatatcttcacctaaatactagatagaagcatcctcagaagcttctctgtgatgactgcattcaactcacggagttgaacactccttttgagagcgcagttttgaaactctctttctgtggcatctgcaaggggacatgtagacctctttgaagatttcgttggaaacggaatcatcttcacataaaaactatacagaagcagtctcagaatcttctttgtgatgtttgcattcaaatcccagagttgaactttcctttcaaagttcacgtttgaaacactctttttgcaggatctacaagtggatatttgcaccactctgtatccttcgttcgaaacgggtatatcttcacatgacatctagacagaagctttctcagaaaattctttgggatgattgagttgaactcacagagctgagcattccttgcgatgtagcagtttagaaacacactttctgcagaatctgcaagtgcatatgtggacctctctgaggaattcgttggaaacgggataatttcagctgactaaacagaagcattctcagaaccttcttcgtgatgtctgcattcaactcacagtgtggaacctttctttgatagttcaggtttgaaacactctttttgtagaaactgcaaggggataattgcacttctttgaggcctaccgtagtaaaggaaataacttcctataaaaagaagacagaagaattctcagagccctcttcgtgatgtttgcattcaactcacagtgctgaacctttctttgatagtgcagctttgaaacactctttttgtagaaactgcaagtggatgtttggtcctctctgaggatttcgttggaaacgggataaaccgcacagaactaaaacagaagcattgtcagaaacttctttgtgatgattgcattcaactcacagagttgaaggttccttttcaaacagcagtttccaatcactctttctgtggaatctgcaagtggatatttgggcctctctgaggatttcgttggaaacgggataaaacgcacagaactaaaacagaagcattctcagaaacttctctgtgatgtttgtgttcaactcccagagtttcacgttgcttttcatagagtagttctgaaacatgcttttcgtagtgtctgcaagtggacatttggagcgctttcaggcctgtggtggaaaacgaattatggtcacataaaaactggagagaagccttctcagaaacttctctgtgatgattgcattcaactcacagagttgaaccctcctatggatagagcagtgttgaaactctctttttgtggaatctgcaagtggatatgtggacctctccgaagatgtctttggaaacgggactatcttcacataaaaactaaacagaagcattctcagaaacttcttggtgatgtttgcattcaaatcccagagttgaaccttcctttgatagttcaggtttgaaacactctttttgtaggatctgcaagtggatatttggaccactctgtggccttcgttcgaaacgggtacatcttcgcataaaatctagacagaagcattctcagaaaatactttgtgatgattgagttgaactcacagagctgaacattcctttggatggagcaggcttgagacacactttttgtagaatctacaagtggatatttggacctctctgaggatttcgttggaaacgggataactgcacctaactaaaaggaagcattctcagaaactgctttgtgatgattgcattcacctcacagagttgaacattcctattgatagagcagtttggaaacactcctgttgtggaatgtgcaagtggagatttggagcgctttgaggcctatggtagtaaagggaatagcttcatagaaaaactagacagatgcattctcaggaactttttggtgatgtttgtattcaactcccagagttgaactttcctttggaaagagcagctatgaaacactctttttctagaatctgcaagtggacgtttggagggctttgtggtttgtggtggaaaaggaaatatcttcacctaaatactagatagaagcattctcagaagcttctctgtgatgactgcattcaactcacggagttgaacactccttttgagagcgcagttttgaaactccctttctgtggcatctgcaaggggacatgtagacctctttgaagatttcgttggaaacggaatcatcttcacataaaaactatacagaagcagtctcagaatcttctttgtgatgtttgcattcaaatcccagagttgaactttcctttcaaagttcacgtttgaaacactctttttgcaggatctacaagtggatatttggaccactctgtgtccttcgttcgaaacgggtataacttcacacgacatctagacagaagctttctcagaaaattctttgggatgattgagtggaactcacagagctgaacattccttgcgatggagcagtttagaaacacactttctgcagaatctgcaagtgcatatttggacctctctgaggaattcgttggaaacgggataatttcagctgactaaacagaagcattctcagaaccttcttcgtgatgtctgcattcaactcacaagtgtggaacctttctttgatagttcaggtttgaaacactctttttgtagaaactgcaaggggataattgcacttctttgaggcctaccgtagtaaaggaaataacttcctatagaaagaagacagaagcattctcagaaccctcttcgtgatgtttgcattcaactcacagtgctgaacctttctttgatagttcagctttgaaacactcttcttgtagaaactgcaagtggatatttggtcctctctgaggatttcgttggaaacgggataaaccgcacagaactaaacagaagaattctcagagccctcttcgtgatgtttgcattcaactcacagtgctgaacctttctttgatagtgcagctttgaaacactctttttgtagaaactgcaagtggatgtttggtcctctctgaggatttcgttggaaacgggataaaccgcacagaactaaaacagaagcattgtcagaaacttctttgtgatgattgcattcaactcacagagttgaaggttccttttcaaacagcagtttccaatcactctttctgtggaatctgcaagtggatatttgggcctctctgaggatttcgttggaaacgggataaaacgcacagaactaaaacagaagcattctcagaaacttctctgtgatgtttgtgttcaactcccagagtttcacgttgcttttcatagagtagttctgaaacatgcttttcgtagtgtctgcaagtggacatttggatcgctttcaggcctgtggtggaaaacgaattatggtcacataaaaactggagagaagcattctcagaaaatactttgtgatgattgagtttaaatcacagagctgaccattcctttggatggagcaggtttgagacacactttttgtagaatctacaagtggatatttggacctctctgaggatttcgttggaaacgggataactgcacctaactaaacggaagcattctcagaaactgctttgtgatgattgcattcacctcacagagttgaacattcctattgatagagcagtttggaaacactcttgttgtggaatgtgcaagtggagatttggagcgctttgaggcctgtggaagtaaagggaatagcttcatagaaaaactagacagatgcattctcaggaactttttggtgatgtttgtattcaactcccagagttgaactttcctttggaaagagcagctatgaaacactctttttctagaatctgcaagtggacgtttggagggctttgtggtttgtggtggaaaaggaaatatcttcacctaaatactagatagaagcattctcagaagcttctctgtgatgactgcattcaactcacggagttgaacactccttttgagagcgcagttttgaaactctctttctgtggcatctgcaaggggacatatagacctctttgaagatttcgttggaaacggaatcatcttcacataaaaactatacagaagcagtctcagaatcttctttgtgatgtttgcattcaaatcccagagttgaactttcctttcaaagttcacgtttgaaacactctttttgcaggatctacaagtggatatttggaccactctgtgtccttcgttcgaaacgggtatatcttcacatgacatctagacagaagctttctcagaaaattctttgggatgattgagtggaactcacagagctgaacattcttgcgatgtagcagtttagaaacacactttctgcagaatctgcaagtgcatatttggacctctctgaggaattcgttggaaacgggataatttcagctgactaaacagaagcattctcagaaccttcttcgtgatgtctgcattcaactcacagtgtggaacctttctttgatagttcaggtttgaaacactctttttgtagaaactgcaaggggataattgcacttctttgaggcctaccgtagtaaaggaaataacttcctatagaaagaagacagaagaattctcagagccctcttcgtgatgtttgcattcaactcacagtgctgaacctttctttgatagtgcagctttgaaacactctttttgtagaaactgcaagtggatgtttggtcctctctgaggatttcgttggaaacgggataaaccgcacagaactaaaacagaagcattcacagaaaactcttggtgacgactgagtttaactcacagagctgaacattcctttggatggagcagtttcgaaacacactatttgtagaatctgcaagtggatatttgggcctctctgaggatttcgttggaaacgggataaaccgcacagaactaaaacagaagcattctcagaaactactttgtgatgattgcattcaagtcacagagttgaacattccctttgacagagcagtttggaaactctctttgtgtagaatctgcaagtggagatatggaccgctttgaggcctatggtagtaaaggaaatagcttcatataaaagctagacagtagcattctcagaaacttctttgtgatgcttgcattcaactcacagagttgaactttcctttcgagagagaagctttgaaacaccctttttccagaatctgcaagtggacatttggagggctttgaggcctgtggtggaaaaggaattatcttcccgtaaaagctagatagaagcattgtcagaaacttctttgtgatgattgcattcaactcacagagttgaaggttccttttcaaacagcagtttccaatcactctttctgtggaatctgcaagtggatatttgggcctctctgaggatttcgttggaaacgggataaaacgcacagaactaaaacagaagcattctcagaaacttctctgtgatgtttgtgttcaactcccagagtttcacgttgcttttcatagagtagttctgaaacatgcttttcgtagtgtctgcaagtggacatttggagcgctttcaggcctgtggtggaaaacgaattatggtcacataaaaactggagagaagccttctcagaaacttctctgtgatgattgcattcaactcacagagttgaaccctcctatggatagagcagtgttgaaactctctttttgtggaatctgcaagtggatatgtggacctctccgaagatgtctttggaaacgggaatatcttcacataaaaactaaacagaagcattctcagaaacttcttggtgatgtttgcattcaaatcccagagttgaaccttcctttgatagttcaggtttgaaacactctttttgtaggatctgcaagtggctatttggacaactctgtggccttcgttcgaaacgggtatatcttcgcataaaatctagacagaagcattctcagaaaatactttgtgatgattgagtttaaatcacagagctgaacattcctttggatggagcaggtttgagacacactttttgtagaatctacaagtggatatttggacctctctgaggatttcgttggaaacgggatatctgcacctaactaaacggaagcattctcagaaactgctttgtgatgattgcattcacctcacagagttgaacattcctattgatagagcagtttggaaacactcttgttgtggaatgtgcaagtggagatttggagcgctttgaggcctatggtagtaaagggaatagcttcatagaaaaactagacagatgcattctcaggaactttttggtgatgtttgtattcaactcccaagagttgaactttcctttggaaagagcagctatgaaacactctttttctagaatctgcaagtggacgtttggagggctttgtggtttgtggtggaaaaggaaatatcttcacctaaatactagatagatctgtttagttctgtgcggtttatcccgtttccaacgaaatcctcatagaggaccaaatatccacttgcagtttctacaaaaagagtgtttcaaagctgtactatcaaagaaaggttcaggaggaggagccaagatggccgaataggaacagctccggtctacagctcccagcgtgagcgacgcagaagacgggtgatttctgcatttccatctgaggtaccgggttcatctcactagggagtgccagacagtgggctcaggccagtgtgtgtgcgcaccgtgcgcgagccgaagcagagcgaggcattgcctcacctgggaagcgcaaggggtcagggagttccctttccgagtcaaagaaagggttgacggacgcacgtggaaaatcgggtcactcccacccgaatattgcgcttttcagaccggcttaagaaacggcgcaccacgagactatatcccacacctggctcagagggtcctacgcccacggaatctcgctgattgctagcacagcagtctgagatcaaactgcaaggcggcaacgaggctgggggaggggcgcccgccattgcccaggcttgcttaggtaaacaaagcagctgggaagctcgaactgggtggagcccaccacagctcaaggaggcctgcctgcctctgtaggctccacctctgggggctggcacagacaaacaaaaagacagcagtaacctctgcagacttaagtgtccctgtctgacagctttgaagagagcagtggttctcccagcacgcannnnnnnnnnnnnnnnnnnnnnnnnnnnnnnnnnnnnnnnnnnnnnnnnnnnnnnnnnnnnnnnnnnnnnnnnnnnnnnnnnnnnnnnnnnnnnnnnnnnagcattctcagaaccttcttcgtgatgtctgcattcaactcacagtgtggaacctttctttgatagttcaggtttgaaacactctttttctagaaactgcaaggggataactgcacttctttgaggcctaccgtagtaaaggaaataacttcctataaaaagaagacagaagctttctcagaaaattctttgggatgattgagttgaactcacagagctgaacattccttgcgatggagcagtttagaaacacactttctgcagaatctgcaagtgcatatttggacctctctgaggaattcgttggaaacgggataatttcagccgactaaacagaagcattctcagaaccttcttcgtgatgtctgcattcaactcacagtgtggaacctttctttgatagttcaggtttgaaacactctttttgtagaaactgcaaggggataattgcacttctttcaggtctaccgtagtaaaggaaataacttcctataaaaagaagacagaagcattctcagaaccttcttcgtgatgtttgcattcaactcacagtgctgaacctttctttgatagttcagctttgaaacactctttttgtagaaactgcaagtggatatttggtcctctctgaggatttcgttggaaacgggataaaccgcacagaactaaacagaagcattcacagaaaactcttggtgacgactgagtttaactcacagagctgaacattcctttggatggagcagtttcgaaacacactctttgtagaatgtgcaagtggatatttgggcctctctgaggatttcgttggaaacgggataaaccgcacagaactaaaacagaagcattctgagaaactactttgtgatgattgcattcaagtcacagagctgaacattctctttgacagagcagtttggaaactctctttgtgtagaatctgcaagtggagatatggaatgctttgaggactatggtagtaaaggaaatagcttcatataaaagctagacagtcgcattctcagaaacttctttgtgatgcttgcattcaactcacagagttgaactttcctttcgagagagaagctttgaaacactctttttccagaatctgcaagtggacatttggagggctttgaggcctgtggtggaaaaggaattatcttcccgtaaaagctagatagaagcattgtcagaaacttctttgtgatgattgcattcaagtcacagagttgaaggttccttttcaaagagcagtttccaatcactctttctgtggaatctgcaagtggatatttggacctctttgaagatttcgttggaaacgggagaatcttcacagaaaagctaaacagaagcattctcagaaacttctctgtgatgtttgtgttcaactcccagagtttcacgttgcttttcatagagtagttctgaaacatgcttttcgtagtgtctgcaagtggacatttggagcgctttcaggcctgtggtggaaaacgaattatggtcacataaaaactggagagaagccttctcagaaacttctctgtgatgattgcattcaactcacagagttgaaccctcctatggatagagcagtgttgaaactctctttttgtggaatctgcaagtggatatgtggacctctccgaagatgtctttggaaacgggaatatcttcacataaaaactaaacagaagcattctcagaaacttcttggtgatgtttgcattcaaatcccagagttgaaccttcctttgatagttcaggtttgaaacactctttttgtaggatctgcaattggctatttagaccactctgtggccttcgttcgaaacgggtatatcttcgcataaaatctagacagaagcattctcagaaaatactttgtgatgattgagttgaactcacagagctgaacattcctttggatggagcaggtttgagacacactttttgtagaatctacaagtggatatttggacctctctgaggatttcgttggaaacgggataactgcacctaactaaacggaagcattctcagaaactgctttgtgatgattgcattcacctcacagggttgaacattcctattgatagagcagtttggaaacactcttgttgtggaatgtgcaagtggagatttggagcgctttgaggcttatggtagtaaagggaatagcttcatagaaaaactagacagatgcattctcaggaactttttggtgatgtttgtattcaactcccagagttgaactttcctttggaaagagcagctatgaaacactctttttctagaatctgcaagtggacgtttggagggctttgtggtttgtggtggaaaaggaaatatcttcacctaaatactagatagaagcattctcagaagcttctctgtgatgactgcgttcaactcacggagttgaacactccttttgagagcgcagttttgaaactctgtttctgtggcatctgcaaggggacatgtagacctctttgaagatttcgttggaaacggaatcatcttcacatcaaaactatacagaagcagtctcagaatcttctttgtgatgtttgcattcaaatcccagagttgaactttcctttcaaagttcacgtttgaaacactctttttgcaggatctacaagtggatatttggaccactctgtggccttcgttcgaaacgggtatatcttcacatgacatctagacagaagctttctcagaaaattctttgggatgattgagtggaactcacagagctgaacattccttgcgatgtagcagtttagaaacacactttctgcagaatctgcaagtgcatatttggacctctctgaggaattcgttggaaacgggataatttcagctgactaaacagaagcattctcagaaccttcttcgtgatgtctgcattcaactcacagtgtggaacctttctttgatagttcaggtttgaaacactctttttgtagaaactgcaaggggataattgcacttctttgaggcctaccgtagtaaaggaaataacttcctatagaaagaagacagaagaattctcagagccctcttcgtgatgtttgcattcaactcacagtgctgaacctttctttgatagtgcagctttgaaacactctttttgtagaaactgcaagtggatgtttggtcctctctgaggatttcgttggaaacgggataaaccgcacagaactaaaacagaagcattgtcagaaacttctttgtgatgattgcattcaactcacagagttgaaggttccttttcaaacagcagtttccaatcactctttctgtggaatctgcaagtggatatttgggcctctctgaggatttcgttggaaacgggataaaacgcacagaactaaaacagaagcattctcagaaacttctctgtgatgtttgtgttcaactcccagagtttcacgttgcttttcatagagtagttctgaaacatgcttttcgtagtgtctgcaagtggacatttggagcgctttcaggcctgtggtggaaaacgaattatggtcacataaaaactggagagaagccttctcagaaacttctctgtgatgattgcattcaactcacagagttgaaccctcctatggatagagcagtgttgaaactctctttttgtggaatctgcaagtggatatgtggacctctccgaagatgtctttggaaacgggaatatcttcacataaaaactaaacagaagcattctcagaaacttcttcgtgatgtttgcattcaaatcccagagttgaaccttcctttgagagttcaggtttgaaacactctttttgtaggatctgcaagtggatatttggaccactctgtggccttcgttcgaaacgggtacatcttcgcataaaatctagacagaagcattctcagaaaatactttgtgatgattgagttgaactcacagagctgaacattcctttggatggagcaggtttgagacacactttttgtagaatctacaagtggatatttggacctctctgaggatttcgttggaaacgcgataactgcacctaactaaacggaagcattctcagaaactgctttgtgatgattgcattcacctcacagagttgaacattcctattgatagagcagtttggaaacactcttgttgtggaatgtgcaagtggagatttggagcgctttgaggcctatggtagtaaagggaatagcttcatagaaaaactagacagatgcattctcaggaactttttggtgatgtttgtattcaactcccagagttgaactttcctttggaaagagcagctatgaaacaccctttttctagaatctgcaagtggacgtttggagggctttgtggtttgtggtggaaaaggaaatatcttcacctaaatactagatagaagcattctcagaagcttctctgtgatgactgcattcaactcacggagttgaacactccttttgagagcgcagttttgaaactctctttctgtggcatctgcaaggggacatgtagacctctttgaagatttcgttggaaacggaatcatcttcacataaaaactatacagaagcagtctcagaatcttctttgtgatgtttgcattcaaatcccagagttgaactttcctttcaaagttcacgtttgaagcactctttttgcaggatctacaagtggatatttggaccactctgtgtccttcgttcgaaacgggtatatcttcacatgacatctagacagaagctttctcagaaaattctttgggatgattgagtggaactcacagagctgaacattccttgcgatgtagcagtttagaaacacactttctgcagaatctgcaagtgcatatttggacctctctgaggaattcgttggaaacgggataatttcagctgactaaacagaagcattctcagaaccttcttcgtgatgtctgcattcaactcacagtgtggaacctttctttgatagttcaggtttgaaacactctttttgtagaaactgcaaggggataattgcacttctttgaggcctaccgtagtaaaggaaataacttcctatagaaagaagacagaagcattctcggaaccctcttcgtgatgtttgcattcaactcacagtgctgaaactttctttgatagttcagctttgaaacactctttttgtagaaactgcaagtggatatttggtcctctctgaggatttcgttggaaatgggataaaccacacagaactaaacagaagcattctcagaacctacttcgtgatgtttgcattcaactcacagtgttgaacctttctttgatagttcaggtttgaaacggtctttctgtagaaactgcaagtagatatttggacctctctgaggatttcgttggaaacgggataaaccgcacagaactaaaacagaagcattcacagaaaactcttggtgacgactgagtttaactcacagagctgaacattcctttggatggagcagtttcgaaacacactatttgtagaatgtgcaagtggatatttaggcctctctgaggatttcgttggaaacgggataaaccgcacagaactaaacagaagcattctcagaaactactttgtgatgattgcattcaagtcacagagttgaacattccctttgacagagcagtttggaaactctctttgtgtagaatctgcaagtggagatatggaccgctttgaggcctatggtagtaaaggaaatagcttcatataaaagctagacagtagcattctcagaaacttctttgtgatgcttgcattcaactcacagagttgaactttcctttcgagagagaagctttgaaacactctttttccagaatctgcaagtggacatttggagggctttgaggcctgtggtggaaaaggaattatcttcccgtaaaagctagatagaagcattgtcagaaacttctttgtgatgattgcattcaactcacagagttgaaggttccttttcaaacagcagtttccaatcactctttctgtggaatctgcaagtggatatttgggcctctctgaggatttcgttggaaacgggataaaacgcacagaactaaaacagaagcattctcagaaacttctctgtgatgtttgtgttcaactcccagagtttcacgttgcttttcatagagtagttctgaaacatgcttttcgtagtgtctgcaagtggacatttggagcgctttcaggcctgtggtggaaaacgaattatggtcacataaaaactggagagaagccttctcagaaacttctctgtgatgattgcattcaactcacagagttgaaccctcctatggatagagcagtgttgaaactctctttttgtggaatctgcaagtggatatgtggacctctccgaagatgtctttggaaacgggaatatcttcacataaaaactaaacagaagcattctcagaaacttcttggtgatgtttgcattcaaatcccagagttgaaccttcctttgatagtttaggtttgaaacactctttttgtaggatctgcaagtggatatttggaccactctgtggccttcgttcgaaacgggtacatcttcgcataaaatctagacagaagcattctcagaaaatactttgtgatgattgagttgaactcacagagctgaacattcctttggatggagcaggtttgagacacactttttgtagaatctacaagtggatatttggacctctctgaggatttcgttggaaacgggataactgcacctaactaaacggaagcattctcagaaactgctttgtgatgattgcattcacctcacagagttgaacattcctattgatagagcagtttggaaacactcttgttgtggaatgtgcaagtggagatttggagtgctttgaggcctatggtagtaaagggaatagcttcatagaaaaactagacagatgcattctcaggaaccttttggtgatgtttgtattcaactcccagagttgaactttcctttggaaagagcagctatgaaacactctttttctagaatctgcaagtggacgtttggagggctttgtggtttgtggtggaaaaggaaatatcttcacctaaatactagatagaagcattctcagaagcttctctgtgatgactgcattcaactcacggagttgaacactccttttgagagcgcagttttgaaactctctttctgtggcatctgcaaggggacatgtagacctctttgaagatttcgttggaaacggaatcatcttcacataaaaactatacagaagcagtctcagaatcttctttgtgatgtttgcattcaaatcccagagttgaactttcttttcaaagttcacgtttgaaacactctttttgcaggatctacaagtggatatttggaccactctgtgtccttcgttcgaaacgggtatatcttcacacgacatctagacagaagctttctcagaaaattctttgggatgattgagtggaactcacagagctgaacattccttgcgatgtagcagtttagaaacacactttctgcagaatctgcaagtgcatatttggacctctctgaggaattcgttggaaacgggataatttcagctgactaaacagaagcattctcagaaccttcttcgtgatgtctgcattcaactcacagtgtggaacctttctttgatagttcaggtttgaaacactctttttgtagaaactgcaaggggatcattgcactctttgaggagtaccgtagtaaaggaaataacttcctataaaaagaagacagaagcattctcagaaccctcttcgtgatgtttgcattcaactcacagtgctgaacctttctttgatagttcagctttgaaacactcttcttgtagaaactgcaagtggatatttggtcctctctgaggatttcgttggaaacgggataaaccgcacagaactaaacagaagaattctcagagccctcttcgtgatgtttgcattcaacctcacagtgctgaacctttctttgatagtgcagctttgaaacactctttttgtagaaactgcaagtggatgtttggtcctctctgaggatttcgttggaaacgggataaaccgcacagaactaaaacagaagcattgtcagaaacttctttgtgatgattgcattcaactcaccgagttgaaggttccttttcaaacagcagtttccaatcactctttctgtggaatctgcaagtggatatttggacctattttgaagatttcgttggaaacgggagaatcttcacagaaaagctaaacagaagcattctcagaaacttctctgtgatgtttgtgttcaactcccagagtttcacgttgcttttcatagagtagttctgaaacatgcttttcgtagtgtctgcaagtggacatttggagcgctttcaggcctgtggtggaaaacgaattatggtcacataaaaactggagagaagccttctcagaaacttctctgtgatgattgcattcaactcacagagttgaaccctcctatggatagagcattgttgaaactctctttttgtggaatctgcaagtggatatgtggacctctccgaagatgtctttggaaacgggaatatcttcacataaaaactaaacagaagcattctcagaaatttcttggtgatgtttgcattcaaatcccagagttgaaccttcctttgatagtgcaggtttgaaacactctttttgtaggatctgcaagtggatatttggaccactctgtggccttcgttcgaaacgggtacatcttcgcataaaatctagacagaagcattctcagaaaatactttgtgatgattgagtttaactcacagagctgaacattcctttggatggagcaggcttgagacacactttttgtagaatctacaagtggatatttggacctctctgaggatttcgttggaaacgggataactgcacctaactaaacggaagcattctcagaaactgctttgtgatgattgcattcacctcacagagttgaacattcctattgatagagcagtttggaaacactcctgttgtggaatgtgcaagtggagatttggagcgctttgaggcctatggtagtaaagggaatagcttcatagaaaaactagacagatgcattctcaggaactttttggtgatgtttgtattcaactcccagagttgaactttcctttggaaagagcagctatgaaacactctttttctagaatctgcaagtggacgtttggagggctttgtggtttgtggtggaaaaggaaatatcttcacctaaatactagagagaagcattctcagaagcttctctgtgatgactgcattcaactcacggagttgaacactcctcttgagagcgcagttttgaaactctctttctgtggcatccgcaaggggacatgtagacctctttgaagatttcgttggaaacggaatcatcttcacataaaatctatacagaagcagtctcagaatcttctttgtgatgtttgcattcaaatcccagagttgaactttcctttcaaagttcacgtttgaaacactctttttgcaggatctacaagtggatatttggaccactctgtgtccttcgttcgaaacgggtatatcttcacacgacatctagacagaagctttctcagaaaattctttgggatgattgagtggaactcacagagctgaacattccttgcgatgtagcagtttagaaacacactttctgcagaatctgcaagtgcatatttggacctctctgaggaattcgttggaaacgggataatttcagctgactaaacagaagcattctcagaaccttcttcgtgatgtctgcattcaactcacagtgtggaacctttctttgatagttcaggtttgaaacactctttttgtagaaactgcaaggggataattgcacttctttgaggcctaccgtagtaaaggaaataacttcctatagaaagaagacagaagcattctcagaaccctcttcgtgatgtttgcattcaactcacagtgctgaacctttctttgatagttcagctttgaaacactctttttgtagaaactgcaagtggatatttggtcctctctgagcatttcgttggaaacgggataaactgcacagaactaaacagaagcattctcagaaccttcttcgtgatgtttgcattcaactcacagtgttgaacctttctttgatagttcaggtttgaaacggtctttctgtagaaactgcaagtagatatttggacctctctgaggatttcgttggaaacgggataacccgcacagaactaaaacagaagcattcacagaaaactcttggtgacgactgagtttaactcacagagctgaacattcctttggatggagcagtttcgaaacacactatttgtagaatgtgcaagtggatatttaggcctctctgaggatttcgttggaaacgggataaaccgcacagaactaaacagaagcattctcagaaactactttgtgatgattgcattcaagtcacagagttgaacattccctttgacagagcagtttggaaactctctttgtgtagaatctgcaagtggagatatggaccgctttgaggcctatggtagtaaaggaaatagcttcatataaaagctagacagtaacattctcagaaacttctttgtgatgcttgcattcaactcacagagttgaacattcctttcaagagagaagctttgaaacactctttttccagaatctgcaaggggacatttggagggctttgaggcctgtggtggaaaaggaattatcttcccgtaaatgctagatagaagcattgtcagaaacttctttgtgatgattgcattcaactcacagagttgaaggttccttttcaaacagcagtttccaatcactctttctgtggaatctgcaagtggatatttcgacctctttgaagatttcgttggaaacgggagaatcttcacagaaaagctaaacagaagcattctcagaaacttctctgtgatgtttgtgttcaactcccagagtttcacgttgcttttcatagagtagttctgaaacatgcttttcgtagtgtctgcaagtggacatttggagcgctttcaggcctgtggtggaaaacgaattatggtcacataaaaactggagagaagccttctcagaaacttctctgtgatgattgcattcaactcacagagttgaaccgtcctatggatagagcagtgttgaaactctctttttgtggaatctgcaagtggatatgtggacctctccgaagatgtctttggaaacggggctatcttcacataaaaactaaacagaagcattctcagaaacttcttggtgatgtttgcattcaaatcccagagttgaaccgtcctttgatagttcaggtttgaaacactctttttgtaggatctgcaagtggctatttggaccactctgtggccttcgttcgaaacgggtatatcttcgcataaaatctagacagaagcattctcagaaaatactttgtgatgattgagtttaaatcacagagctgaccattcctttggatggagcaggtttgagacacactttttgtagaatctacaagtggatatttggacctctctgaggatttcgttggaaacgggataactgcacctaactaaacggaagcattctcagaaactgctttgtgatgattgcattcacctcacagagttgaacattcctattgatagagcagtttggaaacactcttgttgtggaatgtgcaagtggagatttggagcgctttgaggcctatggtagtaaagggaatagcttcatagaaaaactagacagatgcattctcaggaactttttggtgatgtttgtattcaactcccagagttgaactttcctttggaaagagcagctatgaaacaccctttttctagaatctgcaagtggacgtttggagggctttgtggtttgtggtggaaaaggaaatatcttcacctaaatactagatagaagcattctcagaagcttctctgtgatgactgcattcaactcacggagttgaacactccttttgagagcgcagttttgaaactctctttctgtggcatctgcaaggggacatgtagacctctttgaagatttcgttggaaacggaatcatcttcacataaaaactatacagaagcagtctcagaatcttctttgtgatgtttgcattcaaatcccagagttgaactttcctttcaaagttcacgtttgaaacactctttttgcaggatctacaagtggatatttggaccactctgtgtccttcgttcgaaacgggtatatcttcacaggacatctagacagaagctttctcagaaaattctttgggatgattgagtggaactcacagagctgaacattccttgcgatgtagcagtttagaaacacactttctgcagaatctgcaagtgcatatttggacctctctgaggaattcgttggaaacgggataatttcagctgactaaacagaagcattctcagaaccttcttcgtgatgtctgcattcaactcacagtgtggaacctttctttgatagttcaggtttgaaacactctttttgtagaaactgcaaggggataattgcacttctttgaggcctaccgtagtaaaggaaataacttcctatagaaagaagacagaagcattctcagaaccctcttcgtgatgtttgcattcaactcacagtgctgaacctttctttgatagttcagctttgaaacactcttcttgtagaaactgcaagtggatatttggtcctctctgaggatttcgttggaaacgggataaaccgcacagaactaaacagaagaattctcagagccctcttcgtgatgtttgcattcaactcacagtgctgaacctttctttgatagtgcagctttgaaacactctttttgtagaaactgcaagtggatgtttggtcctctctgaggatttcgttggaaacgggataaaccgcacagaactaaaacagaagcattgtcagaaacttctttgtgatgattgcattcaactcacagagttgaaggttccttttcaaacagcagtttccaatcactctttctgtggaatctgcaagtggatatttgggcctctctgaggatttcgttggaaacgggataaaacgcacagaactaaaacagaagcattctcagaaacttctctgtgatgtttgtgttcaactcccagagtttcacgttgcttttcatagagtagttctgaaacatgcttttcgtagtgtctgcaagtggacatttggagcgctttcaggcctgtggtggaaaacgaattatggtcacataaaaactggagagaagccttctcagaaacttctctgtgatgattgcattcaactcacagagttgaaccctcctatggatagagcagtgttgaaactctctttttgtggaatctgcaagtggatatgtggacctctccgaagatgtctttggaaacgggaatatcttcacataaaaactaaacagaagcattctcagaaacttcttggtgatgtttgcattcaaatcccagagttgaaccttcctttgatagttcaggtttgaaacactctttttgtaggatctgcaattggctatttggaccactctgtggccttcgttcgaaacgggtatatcttcgcataaaatctagacagaagcattctcagaaaatactttgtgatgattgagtttaaatcacagagctgaccattcctttggatggagcaggtttgagacacactttttgtagaatctacaagtggatatttggacctctctgaggatttcgttggaaacgggataactgcacctaactaaacggaagcattctcagaaactgctttgtgatgattgcattcacctcacagagttgaacattcctattgatagagcagtttggaaacactcttgttgtggaatgtgcaagtggagatttggagcgctttgaggcctatggtagtaaagggaatagcttcatagaaaaactagacagatgcattctcaggaactttttggtgatgtttgtattcaactcccagagttgaactttcctttggaaagagcagctatgaaacactctttttctagaatctgcaagtggacgtttggagggctttgtggtttgtggtggaaaaggaaatatcttcacctaaatactagatagaagcattctcagaagcttctctgtgatgactgcattcaactcacggagttgaacactccttttgagagcgcagttttgaaactctctttctgtggcatctgcaaggggacatgtagacctctttgaagatttcgttggaaacgaaatcatcttcacataaaaactatacagaagcagtctcagaatcttctttgtgatgtttgcattcaaatcccagagttgaactttcctttcaaagttcacgtttgaaacactctttttgcaggatctacaagtggatatttggaccactctgtgtccttcgttcgaaacgggtatatcttcacatgacatgtagacagaagctttctcagaaaattctttgggatgattgagtggaactcacagagctgaacattccttgcgatgtagcagtttagaaacacactttctgcagaatctgcaagagcatatttggacctctctgaggaattcgatggaaacgggataatttcagctgactaaacagaagcattctcagaaccttcttcgtgatgtctgcattcaactcacagtgtggaacctttctttgatagttcaggtttgaaacactctttttgtagaaactgcaaggggataattgcacttctttgaggcctaccgtagtaaaggaaataacttcctatagaaagaagacagaagcattctcagaaccctcttcgtgatgtttgcattcaactcacagtgctgaacctttctttgatagttcagctttgaaacactcttcttgtagaaactgcaagtggatatttggtcctctctgaggatttcgttggaaacgggataaaccgcacagaactaaacagaagcattctcagagccctcttcgtgatgtttgcattcaactcagagtgctgaatctttctttgatagtgcagctttgaaacactctttttgtagaaactgcaagtgggtatttggtcctctctgaggatttcgttggaaacgggataaaccgcacagaactaaaacagatagcattcacagtaaaactcttggtgacgactgagtttaactcacagagctgaacattcctttggatggagcagtttcgaaacacactatttgtagaatctgcaagtggatatttgggcctctctgaggatttcgttggaaacgggataaaacgcacagaactaaaacagaagcattctcagaaactactttgtgatgattgcattcaagtcacagagttgaacattccctttgacagagcagtttggaaactctctttgtgtagaatctgcaagtggagatatggaccgctttcaggcctatggtagtaaaggaaatagcttcatataaaagctagacagtagcattctcagaaacttctttgtgatgcttgcattcaactcacagagttgaactttcctttcgagagagaagctttgaaacactctttttccagaatctgcaagtggacatttggagggctttgaggcctgtggtggaaaaggaattatcttcccgtaaaagctagatagaagcattgtcagaaacttctttgtgatgattgcattcaactcacagagttgaaggttccttttcaaacagcagtttccaatcactctttctgtggaatctgcaagtggatatttgggcctctctgaggatttcgttggaaacgggataaaacgcacagaactaaaacagaagcattctcagaaacttctctgtgatgtttgtgttcaactcccagagtttcacattgcttttcatagagtagttctgaaacatgcttttcgtagtgtctacaagtggacatttggagcgctttcaggcctgtggtggaaaacgaattatggtcacataaaaactggagagaagccttctcagaaacttctctgggatgattgcattcaactcacagatttgaaccctcctatggatagagcattgttgaaactctctttttgtggaatctgcaagtggatatgtggtcctctttgaagatgtctttggaaacgggaatatcttcacataaaaactaaacagaagcattctcagtaaacttcttggtgatgtttgcattcaaatcccagagttgaaccttcctttgagagttcaggtttgaaacactctttttgtaggatctgcaagtggatatttggaccactctgtggccttcgttcgaaacgggtacatcttcgcataaaatctagacagaagcattctcagaaaatactttgtgatgattgagtttaaatcacagagctgaccattcctttggatggagcaggtttgagacacactttttgtagaatctacaagtggatatttggaccctctctgaggatttcgttggaaacgggataactgcacctaactaaacggaagcattctcagaaactgctttgtgatgattgcattcacctcacagagttgaacattcctattgatagagcagtttggaaacactcttgttgtggaatgtgcaagtggagatttggagcgctttgaggcctatggtagtaaagggaatagcttcatagaaaaactagacagatgcattctcaggaactttttggtgatgtttgtattcaactcccagagttgaactttcctttggaaagagcagctatgaaacactccttttctagaatctgcaagtggacgtttggagggctttgtggtttgtggtggaaaaggaaatatcttcacctaaatactagatagaagcattctcagaagcttctctgtgatgactgcattcaactcacggagttgaacactccttttgagagcgcagttttgaaactctctttctgtggcatctgcaaggggacatgtggacctctttgaagatttcgttggaaacggaatcatcttcacataaaaaatatacagaagcagtctcagaatcttctttgtgatgtttgcattcaaatcccagagatgaactttcctttcaaagttcacgtttgaaacactctttttgcaggatctacaagtggatatttggaccactctgtgtccttcgttcgaaacgggtatatcttcacatgacatctagacagaagctttctcagaaaattctttgggatgattgagtggaactcacagagctgaacattccttgcgatgtagcagtttagaaacacactttctgcagaatctgcaagtgcatatttggacctctctgaggaattcgttggaaacgggataatttcagctgactaaacagaagcattctcagaaccttcttcgtgatgtctgcattcaactcacagtgtggaacctttctttgatagttcaggtttgaaacactctttttgtagaaactgcaaggggataattgcacttctttgaggcctaccgtagtaaaggaaataacttcctatagaaagaagacagaagaattctcagagccctcttcgtggtgtttgcattcaactcacagtgctgaacctttctttgatagtgcagctttgaaacactctttttgtagaaactgcaagtggatatttggtcctctctgaggatttcgttggaaacgggataaaacgcacagaactaaaacagaagcattctcagaaccttcttcgtgatgtttgcattcaactcacagtgttgaacctttctttgatagttcaggtttgaaacggtctttctgtagaaactgcaagaagatatttggacctctctgaggatttcgttggaaacgggataaaccgcacagaactaaaacagaagcattcacagaaaactcttggtgacgactgagtttaactcacagagctgaacattcctttggatggagcagtttcgaaacacactatttgtagaatgtgcaagtggatatgtgggcctctctgaggatttcgttggaaacgggataaaccgcacagaactaaacagaagcattctcagaaactactttgtgatgattgcattcaagtcacagagttgaacattccctttgacagagcagtttggaaactctctttgtgtagaatctgcaagtggagatatggaccgctttgaggcctatggtagtaaaggaaatagcttcatataaaagctagacagtagcattctcagaaacttctttgtgatgcttgcattcaactcacagagttgaactttcctttcgagagagaagctttgaaacactctttttccagaatctgcaagtggacatttggagggctttgaggcctgtggtggaaaaggaattatcttcccgtaaaagctagatagaagcattgtcagaaacttctttgtgatgattgcattcaactcacagagttgaaggttccttttcaaacagcagtttccaatcactctttctgtggaatctgcaagtggatatttgggcctctctgaggatttcgttggaaacgggataaaacgcacagaactaaaacagaagcattctcagaaacttctctgtgatgtttgtgttcaactcccagagtttcacgttgcttttcatagagtacttctgaaacatgcttttcgtagtgtctgcaagtggacatttggagcgctttcaggcctgtggtggaaaacgaattatggtcacataaaaactggagagaagccttctcagaaacttctctgtgatgattgcattcaactcacagagttgaaccctcctatggatagagcagtgttgaaactctctttttgtggaatctgcaagtggatatgtggacctctccgaagatgtctttggaaacgggaatatcttcacataaaaactaaacagaagcattctcagaaacttcttggtgatgttggcattcaaaccccagagttgaaccttcctttgatagttcaggtttgaaacactctttttgtaggatctgcaagtggatatttggaccactctgtggccttcgttcgaaacgggtacatcttcgcataaaatctagacagaagcattctcagaaaatactttgtgatgattgcgttgaactcacagagctgaacattcctttggatggagcaggtttgagacacactttttgtagaatctacaagtggatatttggacctctctgaggatttcgttggaaaccggataactgcacctaactaaacggaagcattctcagaaactgctttgtgatgattgcattcacctcacagagttgaacattcctattgatagagcagtttggaaacactcttgttgtggaatgtgcaagtggagatttggagcgctttgaggcctatggtagtaaagggaatagcttcatagaaaaactagacaggatgcattctcaggaactttttggtgatgtttgtattcaactcccagagttgaactttcctttggaaagagcagctatgaaacactctttttctagaatctgcaagtggacgtttggagggctttgtggtttgtggtggaaaaggaaatatcttcacctaaatactagatagaagcattctcagaagcttctctgtgatgactgcattcaactcacggagttgaacactccttttgagagcgcagttttgaaactctctttctgtggcatctgcaaggggacatgtagacctctttgaagatttcgttggaaacggaatcatcttcacataaaaactatacagaagcagtctcagaatcttctttgtgatgtttgcattcaaatcccagagttgaactttcctttcaaagttcacgtttgaaacactctttttgcaggatctacaagtggatatttggaccactctgtgtccttcgttcgaaacgggtatatcttcacatgacatctagacagaagctttctcagaaaattctttgggatgattgagttgaactcacagagctgagcattccttgcgatgtagcagtttagaaacacactttctgcagaatctgcaagtgcatatttggacctctgtgaggaattcgttggaaacgggataatttcagctgactaaacagaagcattctcagaaccttcttcgtgatgtctgcattcaactcacagtgtggaacctttctttgatagttcaggtttgaaacactctttttgtagaaactgcaaggggataattgcacttctttgaggcctaccgtagtaaaggaaataacttcctatagaaagaagacagaagaattctcagagccctcttcgtgatgtttgcattcaactcacagtgctgaacctttctttgatagtgcagctttgaaacactctttttgtagaaactgcaagtggatgtttggtcctctctgaggatttcgttggaaacgggataaaccgcacagaactaaaacagaagcattcacagaaaactcttggtgacgactgagtttaactcacagagctgaacattcctttggatggagcagtttcgaaacacactatttgtagaatctgcaagtggatatttgggcctctctgaggatttcgttggaaacgggataaactgcacagaactaaaacagaagcattctcagaaactactttgtgatgattgcattcaagtcacagagttgaacattccctttgacagagcagtttggaaactctctttgtgtagaatctgcaagtggagatatggaccgctttgaggcctatggtagtaaaggaaatagcttcatataaaagctagacagtagcattctcagaaacttctttgtgatgcttgcattcaactcacagagttgaactttcctttcgagagagaagctttgaaacactctttttccagaatctgcaagtggacatttggagggctttgaggcctgtggtggaaaaggaattatcttcccgtaaaagctagatagaagcattgtcagaaacttctttgtgatgattgcattcaactcacagagttgaaggttccttttcaaacagcagtttccaatcactctttctgtggaatctgcaagtggatatttgggcctctctgaggatttcgttggaaacgggataaaacgcacagaactaaaacagaagcattctcagaaacttctctgtgatgtttgtgttcaactcccagagtttcacattgcttttcatagagtagttctgaaacatgcttttcgtagtgtctacaagtggacatttggagcgctttcaggcctgtggtggaaaacgaattatggtcacataaaaactggagagaaagccttctcagaaacttctctgtgatgattgcattcaactcacagagttgaaccctcctatggatagagcagtgttgaaactctctttttgtggaatctgcaagtggatatgtggacctctccgaagatgtctttggaaacgggaatatcttcacataaaaactaaacagagcattctcagaaacttcttggtgatgtttgcattcaaatcccagagttgaaccttcctttgatagttcaggtttgaaacactctttctgtaggatctgcaagtggctatttggaccactctgtggccttcgttcgaaacgggtatatcttcgcataaaatctagacagaagcattctcagaaaatacattgcgatgattgagttgaactcacagagctgaacattcctttggatggagcaggtttgagacaccctttttgtagaatctacaagtggatatttggacctctctgaggatttcgttggaaacgggataactgcacctaactaaacggaagcattctcagaaactgctttgtgatgattgcattcacctcacagagttgaacattcctattgatggagcagtttggaaacactcttgttgtggaatgtgcaagtggagatttggagcgctttgagacctatggtagtaaagggaatagcttcatagaaaaactagacagatgcattctcacgaactttttggtgatgtttgtattcaactcccagagttgaactttcctttggaaagagcagctatgaaacactctttttctagaatctgcaagtggacgtttggagggctttgtggtttgtggtggaaaaggaaatatcttcacctaaatactagatagaagcattctcagaagcttctctgtgatgactgcattcaactcacggagttgaacactccttttgagagcgcagttttgaaactctctttctgtggcatctgcaaggggacatgtagacctctttgaagatttcgttggaaacggaatcatcttcacataaaaactatacagaagcagtctcagaatcttctttgtgatgtttgcattcaaatcccagagttgaactttcctttcaaagttcacgtttgaaactctctttttgcaggatctacaagtggatatttggaccactctgtgtccttccttcgaaacgggtatatcttcacatgacatctagacagaagctttctcagaaaattctttgggatgattgagttgaactcacagagctgaacattccttgcgatgtagcagtttagaaacacactttctgcagaatctgcaagtgcatatttggacctctctgaggaattcgttggaaacgggataatttcagctgactaaacagaagcattctcagaaccttcttcgtgatgtctgcattcaactcacagtgtggaacctttctttgatagttcaggtttgaaacactctttttgtagaaactgcaaggggataattgcacttctttgaggcctaccgtagtaaaggaaataacttgctatagaaagaagacagaagcattctcagaaccctcttcgtgatgtttgcattcaactcacagtgctgaacctttctttgatagttcagctttgaaacactcttcttgtagaaactgcaagtggatatttggtcctctctgaggatttcgttggaaacgggataaaccgcacagaactaaacagaagcgttctcagaaccctcttcgtgatgtttgcattcaactcacagtgctgaacctttctttgatagtgcagctttgaaacactctttttgtagaaactgcaagtggatatttggtcctctctgaggatttcgttggaaacgggataaaccgcacggaactaaaacggaagcattctcagagccctcttcgtgatgtttgcattcaactcacagtgctgaacctttctttgatagtgcagctttgaaacactctttttgtagaaactgcaagtggatatttggtcctctctgaggatttcgttggaaacgggataaaccgcacagaactaaaacagaagcattcacagaaaactcttggtgacgactgagtttaactcacagagctgaacattcctttggatggagcagtttcgaaacacactatttgtagaatgtgcaagtggatatttgggcctctctgaggatttcgttggaaacgggataaaacgcacagaactaaaacagaagcattctcagaaactactttgtgatgattgcattcaagtcacagagttgaacattccctttgacagagcagtttggaaactctctttgtgtagaatctgcaagtggagatatggaccgctttgaggcctatggtagtaaaggaaatagcttcatataaaagctagacagtagcattctcagaaacttctttgtgatgcttgcattcaactcacagagttgaactttcctttcgagagagaagctttgaaacactctttttccagaatctgcaagtggacatttggagggctttgaggcctgtggtggaaaaggaattatcttcccgtaaaagctagatagaagccttctcagaaacttctctgtgatgattgcattcaactcacagagttgaaggttccttttcaaagagcagtttccaatcactctttctgtggaatctgcaagtggatatttggacctattttgaagatttcgttggaaacgggagaatcttcacaggaaagctaaacagaagcattctcagaaacttcttggtgatgtttgcattcaaatcccagagtagaaccttcctttgatagttcaggtttgaaacactctttttgtaggatctgcaagtggatatttggaccactctgtggccttcgttcgaaacgggtatatcttcgcataaaatctagacagaagcattctcagaaaatactttgtgatgattgagtttaaatcacagagctgaccattcctttggatggagcaggtttgagacacactttttgtagaatctacaagtggatatttggacctctctgaggatttcgttggaaacgggataactgcacctaactaaacggaagcattctcagaaactgctttgtgatgattgcattcacctcacagagttgaacattcctattgatagagcagtttggaaacactcttgttgtggaatgtgcaagtggagatttggagcgctttgaggcctatggtagtaaagggaatagcatcatagaaaaactagacagatgcattctcaggaactttttggtgatgtttgtattcaactcccagagttgaactttcctttggaaagagcagctatgaaacactctttttctagaatctgcaagtggacgtttggagggctttgtggtttgtggtggaaaaggaaatatcttcacctaaatactagatagaagcattctcagaagcttctctgtgatgactgcattcaactcacggagctgaacactccttttgagagtgcagttttgaaactctctttctgtggcatctgcaaggggacatgtagacctctttgaagatttcgttggaaacggaatcatcttcacataaaaactatacagaagcagtctcagaatcttctttgtgatgtttgcattcaaatcccagagttgaactttcctttcaaagttcacgtttgaaacactctttttgcaggatctacaagtggatatttggaccactctgtgtccttcgttcgaaacgggtatatcttcacatgacatctagacagaagctttctcagaaaatcctttgggatgattgagtggaactcacagagctgaacattccttgcgatgtagcagtttagaaacacactttctgcagaatctgcaagtgcatatttggacctcctctgaggaattcgttggaaacgggataatttcagctgactaaacagaagcattctcagaaccttcttcgtgatgtctgcattcaactcacagtgtggaacctttctttgatagttcagctttgaaacactctttttgtagaaactgcaaggggataattgcacttctttgaggcctaccgtagtaaaggaaataacttcctatagaaagaagacagaagaattctcagagccctcttcgtgatgtttgcattcaactcacagtgctgaacctttctttgatagtgcagctttgaaacactctttttgtagaaactgcaagtggatgtttggtcctctctgaggatttcgttggaaacgggataaaccgcacagaactaaaacagaagcattctcagaaccttcttcgtgatgtttgcattcaactcacagtgttgaacctttctttgatagttcaggtttgaaacggtctttctgtagaaactgcaagtagatatttggacctctctgaggatttcgttggaaacgggataacccgcacagaactaaaacagaagcattcacagaaaactcttggtgacgactgagtttaactcacagagctgaacattcctttggatggagcagtttcgaaacacactatttgtagaatgtgcaagtggatatttgggcctctctgaggatttcgttggaaacgggataaaccgcacagaactaaacagaagcattctcagaaactactttgtgatgattgcattcaagtcacagagttgaacattccctttgacagagcagtttggaaactctctttgtgtagaatctgcaagtggagatatggaccgctttgaggcctatggtagtaaaggaaatagcttcatataaaagctagacagtagcattctcagaaacttctttgtgatgcttgcattcaactcacagagttgaactttcctttcgagagagaagctttgaaacactctttttccagaatctgcaagtggacatttggagggctttgaggcctgtggtggaaaaggaattatcttcccgtaaaagctagatagaagcattgtcagaaacttctttgtgatgattgcattcaactcacagagttgaaggttccttttcaaacagcagtttccaatcactctttctgtggaatctgcaagtggatatttgggcctctctgaggatttcgttggaaacgggataaaacgcacagaactaaaacagaagcattctcagaaacttctctgtgatgtttgtgttcaactcccagagtttcacattgcttctcatagagtagttctgaaacatgcttttcctagtgtctgcaagtggacatttggagcgctttcaggcctgtggtggaaaacgaattatggtcacataaaaactggagagaagccttctgagaaacttctctgtgatgattgcattcaactcacagatttgaaacctcctatggatagagcagtgttgaaactctctttttgtggaatctgcaagtggatatgtggacccctccgaagatgtctttggaaacgggaatatcttcacataaaaactaaacagaagcattctcagaaacttcttggtgatgtttgcattcaaatcccagagttgaaccttcctttgatagttcaggtttgaaacactctttctgtaggatctgcaagtggctatttggaccactctgtggccttcgttcgaaacgggtatatcttcgcataaaatctagacagaagcattctcagaaaatactttgtgatgattgagtttaactcacagagctgaacattcctttggatggagcaggtttgagacacactttttgtagaatctacaagtggatatttggacctctctgaggatttcgttggaaacgcgataactgcacctaactaaacggaagcattctcagaaactgctttgtgatgattgcattcacctcacagagttgaacattcctattgatagagcagtttggaaacactcttgttgtggaatgtgcaagtggagatttggagcgctttgaggcctatggtagtaaagggaatagcttcatagaaaaactagacagatgcattctcaggaactttttggtgatgtttgcattcaactcccagagttgaactttcctttggaaagagcagctatgaaacactctttttctagaatctgcaagtggacgtttggagggctttgtggtttgtggtggaaaaggaaatatcttcacctaaatactagagagaagcattctcagaagcttctctgtgatgactgcattcaactcacggagttgaacactccttttgagagcgcagttttgaaactctctttctgtggcatctgcaaggggacatgtagacctctttgaagatttcgttggaaacggaatcatcttcacataaaaactatacagaagcagtatcagaatcttctttgtgatgtttgcattcaaatcccagagttgaactttcctttcaaagttcacgtttgaaacactctttttgcaggatctacaagtggatatttggaccactctgtgtccttcgttcgaaacgggtatatcttcacatgacatctagacagaagctttctcagaaaattctttgggatgattgagttgaactcacagagctgaacattccttgcgatggagcagtttagaaacacactttctgcagaatctgcaagtgcatatttggacctctctgaggaattcgttggaaacgggataatttcagctgactaaacagaagcattctcagaatcttcttcgtgatgtctgcattcaactcacagtgtggcacctttctttgatagttcaggtttgaaacactctttttgtagaaactgcaaggggataattgcacttctttgaggcctaccgtagtaaaggaaataacttcctatacaaagaagatagaagaattctcagagccctcttcgtgatgtttgcattcaactcacagtgctgaacctttctttgatagtgcagctttgaaacactctttttgtagaaactgcaagtggatatttggtcctctctgaggatttcgttggaaacgggataaaccgcacagaactaaaacagaagcattcacagaaaactcttggtgacgactgagtttaactcacagagctgaacattcctttggatggagcagtttcgaaacacactatttgtagaatctgcaagtggatatttgggcctctctgaggatttcgttggaaacgggataaaacgcacagaagtaaaacagaagcaatctcagaaactactttgtgatgattgcattcaagtcacagagttgaacattccctttgacagagcagtttggaaactctctttgtgtagaatctgcaagtggagatatggaccgctttgaggcctatggtagtaaaggaaataccttcatataaaagctagacagtagcattctcagaaacttctttgtgatgcttgcattcaactcacagagttgaactttcctttcgagagagaagctttgaaacactctttttccagaatctgcaagtggacatttggagggctttgaggcctgtggtggaaaaggaattatcttcccgtaaaagctagatagaagcattgtcagaaacttctttgtgatgattgcattcaactcacagagttgaaggttccttttcaaagagcagtttccaatcactctttctgtggaatctgcaagtggatatttggacctctttgaagatttcgttggaaacgggagaatcttcacagaaaagctaaacagaagcattctccgaaacttctctgtgatgtttgtgttcaactcccagagtttcacattgcttttcatagagtagttctgaaacatgcttttcgtagtgtctgcaagtggacatttggagcgctttcaggcctgtggtggaaaacgaattatggtcacataaaaactggagagaagccttctcagaaacttctctgtgatgattgcattcaactcacagagttgaaccctcctatggatagagcagtgttgaaactctctttttgtggaatctgcaagtggatatgtggacctctccgaagatgtctttggaaacgggaatatcttcacataaaaactaaacagaagcattctcagaaacttcttggtgatgtttgcattcaaatgccagagttgaaccttcctttgatagttcaggtttgaaacactctttttgtaggatctgcaagtggatatttggaccactctgtggccttcgttcgaaacgggtatatcttcgcataaaatctagacagaagcattctcagaatatactttgtgatgattgagtttaactcacagagctgaacattcctttggatggagcaggtttgagacacactttttgtagaatctacaagtggatatttggacctctctgaggatttcgttggaaacgggataactgcacctaactaaacggaagcattctcagaaactgctttgtgatgattgcattcacctcacagagttgaacattcctattgatagagcagtttggaaacactcttgttgtggaatgtgcaagtggagatttggagcgctttgaggcctatggtagtaaagggaatagcttcatagaaaaactagacagaatgcattctcagggaactttttggtgatgtttgtattcaactcccagagttgaactttcctttggaaagagcagctatgaaacactctttttctagaatctgcaagtggacgtttggagggctttgtggtttgtggtggaaaaggaaatatcttcacctaaatactagatagaagctttctcagaagcttctctgtgatgactgcattcaactcacggagttgaacactccttttgagagcgcagttttgaaactccctttctgtggcatctgcaaggggacatgtagacctctttgaagatttcgttggaaacggaatcatcttcacataaaaactatacagaagtagtctcagaatcttctttgtgatgtttgcattcaaatcccagagttgaactttcctttcaaagttcacgtttgaaacactctttttgcaggatctacaagtggatatttggaccactctgtgtccttcgttcgaaacgggtatatcttcacacgacatctagacagaagctttctcagaaaattctttgggatgattgagttgaactcacagagctgaacattccttgcgatgtagcagtttagaaacacactttctgcagaatctgcaagtgcatatttggacctctcagagtaattcgttggaaacgggataatttcagctgactaaacagaagcattctcagaaccttcttcgtgatgtctgcattcaactcacagtgtggaacctttctttgatagttcaggtttgaaacactctttttgtagaaactgcaaggggataatggcacttctttgaggcctaccgtagtaaaggaaataacttcctatagaaagaagacagaagcattctcagaaccctcttcgtgatgtttgcattcaactcacagtgctgaacctttctttgatagttcagctttgaaacactcttcttgtagaaactgcaagtggatatatggtcctttctgaggatttcgttggaaacgggataaaccgcacagaactaaacagaagcattctcagaaccttcttcgtgatgtttgcattcaactcacagtgttgaacctttctttgatagttcaggtttgaaacggtctttctgtagaaactgcaagtagatatttggacctctctgaggatttcgttggaaacgggataacccgcacagaactaaaacagaagcattcacagaaaactcttggtgacgaatgagtttaactcacagagctgaacattcctttggatggagcagtttcgaagcacactatttgtagaatgtgcaagtggatatttgggcctctctgaggatttcgttggaaacgggataaaccgcacagaactaaacagaagcattctcagaaactactttgtgatgattgcattcaagtcacagagttgaacattccctttgacagagcagtttggaaactctctttgtgtagaatctgcaagtggagatatggaccgctttgaggcctatggtagtaaaggaaatagcttcatataaaagctagacagtagcattctcagaaacttctttgtgatgtttgcattcaactcacagagttgaactttcctgttgagagagaagctgtgaaacattctttctctagactctgcaagtggatatttggagggctttgaggcctgtggtggaaagggaattatcttcccgtaaaaactagatagaagcattctcagaaacttgtttgtgatgattgcattcaactcacagagttgaaggttccttttcaaacagcagtttccaaacactctttctgtggaatctgcaagtggatatttggacctctttgaagatgtcgttggaaacgggataatcttcacagaaaagctaaacagaagcattctcagaaacttctctgtgatgtttgcgttcaactcacagagtttcacattgcttttcatagagcagttctgaaacatgcttttcggaatatctgcaagtggacatttggagagctttcaggcctgtggtggaaaacgaattatcgtcacataaaaactagagagtagccttctcagaaacttctctgtgatgattgcattcaactcacagagttgaaccctccctatggatagagcagtgttgaaactctctttttgtggaatctgcaagtggatatgtggacctctccgaagatgtctttggaaacgggaatatcttcacataaaaactaaacagaagcattctcagaaacttcttggtgatgtttgcattcaaatcccagagttgaaccttcctttgatagttcaggtttgaaacactctttctgtaggatctgcaagtggctatttggaccactctgtggccttcgttcgaaacgggtatatcttcgcataaaatctagacagaagcattctcagaaaatactttgtgatgattgagtttaaatcacagagctgaccattcctttggatggagcaggtttgagacacactttttgtagaatctacaagtggatatttggacctctctgaggatttcgttggaaacgggataactgcacctaactaaacggaagcattctcagaaactgctttgtgatgattgcattcacctcacagagttgaacattcctattgatagagcagtttggaaacactcttgttgtggaatgtgcaagtggagatttggagcgctttgaggcctatggtagtaaagggaatagcttcatagaaaaactagacagatgcattctcaggaactttttggtgatgtttgtattcaactcccagagttgaactttcctttggaaagagcagctatgaaacactctttttctagaatctgcaagtggacgtttggagggctttgtggtttgtggtggaaaaggaaatatcttcacctaaatactagatagaagcattctcagaagcttctctgtgatgactgcattcaactcacggagttgaacactccttttgagagcgcagttttgaaactctctttctgtggcatctgcaaggggacatgtagacctctttgaagatttcgttggaaacggaattcatcttcacataaaaactatacagaagcagtctcagaatcttctttgtgatgtttgcattcaaatcccagagttgaactttcctttcaaagttcacgtttgaaacactctttttgcaggatctacaagtggatatttggaccactctgtgtccttcgttcgaaacgggtatatcttcacatgacatctagactgaagctttctcagaaaattctttgggatgtttgagttgaactcacagagctgaacatttcttgcgatggagcagtttagaaacacactttctgcagaatctgcaattgcatatttggacctctctgaggaattcgttggaaacgggataatttcagctgactaaacagaagcattctcagaaccttcttcgtgatgtctgcattcaactcacagtgtggaacctttctttgatagttcaggtttgaaacactctttttgtagaaactgcaaggggataattgcacttctttgaggcctaccgtagtaaaggaaataacttcctataaaaagaagacagaaacattctcagaaccctcttcgtgatgtttgcattcaattcacggtgctgaaactttctttgatagttcagctttgaaacactctttttgtagaaactgcaagtggatatttggtcctctctgaggatttcgttggaaacgggataaaccgcacagaactatacagaagcattctcagaaccttcttcgtgatgtttgcattcaactcacagtgttgaacctttctttgatagttcaggttggaaacggtctttatgtagaaactgcaagtagatatttggacctgctctgaggatttcgttggaaacgggataaaccgcacagaactaaaacagaagcattcacagaaaactcttggtgacgaatgagtttaactcacagagctgaacattcctttggatggagcagtttcgaaacacactatttgtagaatctgcaagtggatatttgggcctctgctgaggatttcgttggaaacgggataaaccgcacagaactaaagagaagcattctcagaaactactttgtgatgattgcattcaagtcacagagttgaacattccctttgacagagcagtttggaaactctctttgtgtagaatctgcaagtggagatatggaccgctttgaggcctatggtagtaaaggaaatagcttcatataaaagctagacagtagcattctcagaaacttctttgtgatgcttgcattcaactcacagagttgaactttcctttcgagagagaagctttgaaacactctttttccagaatctgcaagtggacatttggagggctttgaggcctgtggtggaaaaggaattatcttcccgtaaaagctagatagaagcattgtcagaaacttctttgtgatgattgcattcaactcacagagatgaaggttcctttacaaacagcagtttccaaacactctttctgtggaatctgcaagtggatatttggacctctttgaagatttcgttggaaacgggagaatcttcacagaaaagctaaacagaagcattctcagaaacttctctgtgatgtttgtgttcaactcccagagtttcacattgcttttcatagagtagttctgaaacatgcttttcgtagtgtctgcaagtggacatttggagtgctttcaggcctgtggtggaaaacgaattatggtcccataaaaactggagagaagccttctcagaaacttctctgtgatgattgcattcaactcacagatttgaaccctcctatggatagagcattcttgaaactctctttttgtggaatctgcaagtggatatgtggacctctccgaagatgtctttggaaacgggaatatcttcacataaaaactaaacagaagcattctcagaaacttcttggtgatgtttgcattcaaatcccagagttgaaccttcctgtgatagttcaggtttgaaacactctttttgtaggatctgcaagtggatatttggaccactctgtggccttcgttcgaaacgggtacatcttcacataaaatctagacagaagcattctcagaaaatactttgtgatgattgagtttaaatcacagagctgaccattcctttggatggagcaggtttgagacacactttttgtagaatctacaagtggatatttggacctctctgaggatttcgttggaaacgggataactgcacctaactaaacggaagcattctcagaaactgctttgtgatgattgcattcacctcacagagttgaacattcgtattgatagagcagtttggaaacactcttcttgtggaatgtgcaagtggagatttggagcgctttggggcctatggtagtaaagggaatagcttcatagaaaaactagacagatgcattctcaggaactttttggtgatgtttgtattcaactcccagagttgaactttcctttggaaagagcagctatgaaacactctttttctagaatctgcaagtggacgtttggagggctttgtggtttgtggtggaaaaggaaatatcttcacctaaatactagatagaagcatcctcagaagcttctctgtgatgactgcattcaactcacggagttgaacactccttttgagagcgcagttttgaaactctctttctgtggcatctgcaaggggacatgtagacctctttgaagatttcgttggaaacggaatcatcttcacataaaaactacacagaagcagtctcagaatcttctttgtgatgtttgcattcaaatccccgagttgaactttcctttcaaagttcacgtttgaaacactctttttgcaggatctacaagtggatatttggaccactctgtgtccttcgatcgaaacgggtatatcttcacatgacatctagacagaagctttctcagaaaattctttgggatgattgagttgaactcacagagctgagcattccttgcgatgtagcagtttagaaacacactttctgcagaatctgcaagtgcatatttggacctctgtgaggaattcgttggaaacgggataatttcagctgactaaacagaagcattctcagaaccttcttcgtgatgtctgcattcaactcacagtgtggaacctttctttgatagttcaggtttgaaacactctttttgtagaaactgcaaggggataattgcactctttgaggagtaccgtagtaaaggaaataacttcctataaaaagaagacagaagcattctcagaaccctcttcgtgatgtttgcattgaactcacagtgctgaacctttctttgatagttcagctttgaaacactctttttgtagaaactgcaagtggatatttggtcctctctgaggatttcgttggaaaagggataaaacgcacagaactaaacagaagcattctcagaaccttcttcgtgatgtttgcattcaactcacagtgttgaacctttctttgatagttcaggttggaaacggtctttctgtagaaactgcaagtagatatttggacctctctgaggatttcgttggaaacgggataaaccgcacagaactaaaacagaagcattcacagaaaactcttggtgacgactgagtttaactcacagagctgaacattcctttggatggagcagtttcgaaacacactatttgtagaatgtgcaagtggatatgtgggcctctctgaggatttcgttggaaacgggataaaccgcacagaactaaacagaagcattctcagaaactactttgtgatgattgcattcaagtcacagagttgaacattccctttgacagagcagtttggaaactctctttgtgtagaatctgcaagtggagatatggaccgctttgaggcctatggtagtaaaggaaatagcttcatataaaagctagacagtagcattctcagaaacttctttgtgatgcttgcattcaactcacagagttgaactttcctttcgagagagaagctttgaaacactctttttccagaatctgcaagtggacatttggagggctttgaggcctgtggtggaaaaggaattatcttcccttaaaagctagatagaagcattgtcagaaacttctttgtgatgattgcattcaactcacagagttgaaggttccttttcaaacagcagtttccaatcactctttctgtggaatctgcaagtggatatttgggcctctctgaggatttcgttggaaacgggataaaacgcacagaactaaaacagaagcattctcagaaacttctctgtgatgtttgtgttcaactcccagagtttcacgttgcttttcatagagtagttctgaaacatgcttttcgtagtgtctgcaagtggacatttggagcgctttcaggcctgtggtggaaaacgaattatggtcacataaaaactggagagaagccttctcagaaacttctctgtgatgattgcattcaactcacagagttgaaccctcctatggatagagcagtgttgaaactctctttttgtggaatctgcaagtggatatgtggacctctccgaagatgtctttggaaacgggaatatcttcacataaaaactaaacagaagcattctcagaaacttcttggtgatgtttgcattcaaatcccagagttgaaccttcctttgatagttcaggtttgaaacactctttttgtaggatctgcaagtggctatttggaccactctgtggccttcgttcgaaacgggtacatcttcgcataaaatctagacagaagcattctcagaaaatactttgtgatgattgagtttaactcacagagctgaacattcctttggatggagcaggcttgagacacactttttgtagaatccacaagtggatatttggacctctctgaggatttcgttggaaacgggataactgcaccgaactaaacggaagcattctcagaaactgctttgtgatgattgcattcacctcacagagttgaacattcctattgatagagcagtttggaaacactcttgttgtggaatgtgcaagtggagatttggagcgctttgaggcctatggtagtaaagggaatagcttcatagaaaaactagacagatgcattctcaggaactttttggtgatgtttgtattcaactcccagagttgaactttcctttggaaagagcagctatgaaacactgtttttctagaatctgcaagtggaagtttggagggctttgtggtttgtggtggaaaaggaaatatcttcacctaaatactagatagaagcattctcagaagcttctctgtgatgactgcattcaactcacggagttgaacactccttttgagagcgcagttttgaaactctctttctgtggcatctgcaaggggacatgtagacctctttgaagatttcgttggaaacggaatcatcttcacataaaaactatacagaagcagtctcagaatcttctttgtgatgtttgcattcaaatcccagagttgaactttcctttcaaagttcacgtttgaaacactctctttgcaggatctacaagtggatatttggaccactctgtgtccttcgttcgaaacgggtatatcttcacatgacatctagacagaagctttctcagaaaattctttgggatgattgagttgaactcacagagctgagcattccttgcgatgtagcagtttagaaacacactttctgcagaatctgcaagtgcatatttggacctctgtgaggaattcgttggaaacgggataatttcagctgactaaacagaagcattctcagaaccttcttcgtgatgtctgcattcaactcacagtgtggaacctttctttgatagttcaggtttgaaacactctttttgtagaaactgcaaggggataattgcacttctttgaggcctaccgtagtaaaggaaataacttcctatagaaagaagacagaagcattctcagaaccttcttcgtgatgtttgcattcaactcacagtgctgaacctttctttgatagttcagctttgaaacactccttttgtagaaactgcaagtggatatttggacctctctgaggatttcgttggaaacgggataaaccgcacagaactaaaacagaagcattcacagtaaaactcttggtgacgactgagtttaactcacagagctgaacattcctttggatggagcagtttcgaaacacactatttgtagaatgtgcaagtggatatgtgggcctctctgaggatttcgttggaaacgggataaaccgcacagaactaaacagaagcattctcagaaactactttgtgatgattgcattcaagtcacagagttgaacattccctttgacagagcagtttggaaactctctttgtgtagaatctgcaagtggagatatggaccgctttgaggcctatggtagtaaaggaaatagcttcatataaaagctagacagtagcattctcagaaacttctttgtgatgcttgcattcaactcacagagttgaactttcctttcgagagagaagctttgaaacactctttttccagaatctgcaagtggacatttggagggctttgaggcctgtggtggaaaaggaattatcttcccgtaaaagctagatagaagcattgtcagaaacttctttgtgatgattgcattcaactcacagagttgaaggttccttttcaaacagcagtttccaatcactctttctgtggaatctgcaagtggatatttgggcctctctgaggatttcgttggaaacgggataaaacgcacagaactaaaacagaagcattctcagaaacttctctgtgatgtttgtgttcaactcccagagtttcacgttgcttttcatagagtagttctgaaacatgcttttcgtagtgtctgcaagtggacatttggagcgctttcaggcctgtggtggaaaacgaattatggtcacataaaaactggagagaagccttctcagaaacttctctgtgatgattgcattcaactcacagagttgaaccctcctatggatagagcagtgttgaaactctctttttgtggaatctgcaagtggatatgtggacctctccgaagatgtctttggaaacgggaatatcttcacataaaaactaaacagaagcattctcagaaacttcttggtgatgtttgcattcaaatcccagagttgaaccttcctttgatagttcaggtttgaaacactctatttgtaggatctgcaagtggatatttggaccactctgtggccttctttcgaaacgggtacatcttcgcataaaatctagacagaagcattctcagaaaatactttgtgatgattgagtgtaactcacagagctgaacattccgttggatggagcaggtttgagacacactttttgtagaatctacaagtggatatttggacctctctgaggatttcgttggaaacgggataactgcacctaactaaacggaagcattctcagaaactgctttgtgatgattgcattcacctcacagagttgaacattcctattgatagagcagtttggaaacactcttgttgtggaatgtgcaagtggagatttggagcgctttgaggcctatggtagtaaagggaatagcttcatagaaaaactagacagatgcattctcaggaactttttggtgatgtttgtattcaactcccagagttgaactttcctttggaaagagcagctatgaaacactctttttctagaatctgcaagtggacgtttggagggctttgtggtttgtggtggaaaaggaaatatcttcacctaaatactagaaagaagcattctcagatgcttctctgtgatgactgcattcaactcacggagttgaacactccttttgagagcgcagttttggaactctctttctgtggcatctgcaaggggacatgtagacctctttgaagatttcgttggaaacggaatcatcttcacataaaaactatacagaagcagtctcagaatcttctttgtgatgtttgcattcaaatcccagagttgaactttcctttcaaagttcacgtttgaaacactctttttgcaggatctacaagtggatatttggaccactctgtgtccttcgttcgaaacgggtatatcttcacacgacatctagacagaagctttctcagaaaattctttgggatgattgagtggaactcacagagctgaacattccttgcgatgtagcagtttagaaacacactttctgcagaatctgcaagtgcatatttggacctctctgaggaattcgttggaaacgggataatttcagctgactaaacagaagcattctcagaaccttcttcgtgatgtctgcattcaactcacagtgtggaacctttctttgatagttcaggtttgaaacactctttttgtagaaactgcaaggggataattgcacttctttgaggcctaccgtagtaaaggaaataacttcctatagaaagaagacagaagaattctcagagccctcttcgtgatgtttgcattcaactcacagtgctgaacctttctttgatagtgcagctttgaaacactctttttgtagaaactgcaagtggatgtttggtcctctctgaggatttcgttggaaacgggataaaccgcacagaactaaaacagaagcattctcagaaccttcttcgtgatgtttgcattcaactcacagtgttgaacctttctttgatagttcaggtttgaaacggtctttctgcagaaactgcaagtagatatttggacctctctgaggatttcgttggaaacgggataccccgcacagaactaaaacagaagcattcacagaaaactcttggtgacgactgagtttaactcacagagctgaacattcctttggatggagcagtttcgaaacacactatttgtagaatgtgcaagtggatatttaggcctctctgaggatttcgttggaaacgggataaaccgcacagaactaaacagaagcattctcagaaactactttgtgatgattgcattcaagtcacagagttgaacattccctttgacagagcagtttggaaactctctttgtgtagaatctgcaagtggagatatggaccgctttgaggcctatggtagtaaaggaaatagcttcatataaaagctagacagtagcattctcagaaacttctttgtgatgcttgcattcaactcacagatttgaactttcctttcgagagagaagctttgaaacactctttttccagaatctgcaagtggacatttggagggctttgaggcctgtggtggaaaaggaattatcttccgtaaaagctagatagaagcattgtcagaaacttctttgtgatgattgcattcaactcacagagttgaaggttccttttcaaagagcagtttccaatcactctttgtgtggaatctgcaagtggatatttggacctattttgaagatttcgttggaaacgggagaatcttcacaggaaagctaaacagaagcattctcagaaacttctctgtgatgtttgtgttcaactcccagagtttcacattgcttttcatagagtagttctgaaacatgcttttcgtagtgtctacaagtggacatttggagcgctttcaggcctgtggtggaaaacgaattatggtcacataaaaactggagagaagccttctcagaaacttctctgtgatgattgcattcaactcacagagttgaaccctcctatggatagagcagtgttgaaactctctttttgtggaatctgcaagtggatatgtggacctctccgaagatgtctttggaaacgggaatatcttcacataaaaactaaacagaagcattctcagaaacttcttggtgatgtttgcattcaaatcccagagttgaaccttcctttgatagttcaggtttgaaacactctttttgtaggatctgcaagtggatatttggaccactctgtggccttcgttcgaaacgggtatatcttcgcataaaatctagacagaagcattctcagaaaatactttgtgatgattgagtttaaatcacagagctgaccattcctttggatggagcaggtttgagacacactttttgtagaatctacaagtggatatttggacctctctgaggatttcgttggaaacgggataactgcacctaactaaacggaagcattctcagaaactgctttgtgatgattgcattcacctcacagagttgaacattcctattgatagagcagtttggaaacactcttgttgtggaatgtgcaagtggagatttggagcgctttgaggcctatggtagtaaagggaatagcttcatagaaaaactagacagatgcattctcaggaactttttggtgatgtttgtattcaactcccagagttgaactttcctttggaaagagcagctatgaaacactctttttctagaatctgcaagtggacgtttggagggctttgtggtttgtggtggaaaaggaaatatcttcacctaaatactagatagaagcattctcagaagcttctctgtgatgactgcattcaactcacggagttgaacactccttttgagagcgcagttttgaaactctctttctgtggcatccgcaaggggacatgtagaactctttgaagatttcgttggaaacggaatcatcttcacatcagaactatacagaagcagtctcagaatcttctttgtgatgtttgcattcaaatcccagagttgaactttcctttcaaagttcacgtttgaaacactctttttgcaggatctacaagtggatatttggaccactctgtgtccttcgttcgaaacgggtatatcttcacatgacatctagacagaagctttctcagaaaattctttgggatgattgagtggaactcacagagctgaacattccttgcgatgtagcagtttagaaacacactttctgcagaatctgcaagtgcatatttggacctctctgaggaattcgttggaaacgggataatttcagctgactaaacagaagcattctcagaaccttcttcgtgatgtctgcattcaactcacagtgtggaacctttctttgatagttcaggtttgaaacactctttttgtagaaactgcaaggggataattgcacttctttgaggcctaccgtagtaaaggaaataacttcctatagaaagaagacagaagcattctcagaaccttcttcgtgatgtctgcattcaactcacggtgctgaacctttctttgatagttcagctttgaaacactctttttgtagaaactgcaagtggatatttggtcctctctgaggatttcgttggaaacgggataaaccgcacagaactaaacagaagaattctcagagccctcttcgtgatgtttgcattcaactcacagtgctgaacctttctttgatagtgcagctttgaaacactctttttgtagaaactgcaagtggatatttggtcctctctgaggatttcgttggaaacgggataaaccgcacagaaataaaacagaagcattctcagaaccttcttcgtgatgtttgcattcaactcacagtgttgaacctttctttgatagttcaggtttgaaacggtctttctgtggaaactgcaagtagatatttggacctctctgaggatttcgttggaaacgggataaaccgcacagaacaaaaacagaagcattcacagaaaactcttggtgacgactgagtttaactcacagagctgaacattcctttggatggagcagtttcgaaacacactatttctagaaggtgcaagtggatatgtgggcctctctgaggatttcgttggaaacgggataaaccgcacagaactaaacagaagcattctcagaaactactttgttatgattgcattcaagtcacagagttgaacattccctttgacagagcagtttggaaactctctttgtgtagaatctgcaagtggagatatggaccgctttgaggcctatggtagtaaaggaaatagcttcatataaaagctagacagtagcattctcagaaacttctttgtgatgcttgcattcaactcacagagttgaactatcctttcgagagagaagctttgaaatactctttttccagaatctgcaagtggacatttggagggctttgaggcctgtggtggaaaaggaattatcttcctgtaaaagctagatagaagcattgtcagaaacttctttgtgatgattgcattcaactcacagagttgaaggttccttttcaaagagcagtttccaatcactctttctgtggaatctgcaagtggatatttggacctctttgaagatttcgttggaaacgggagaatcttcacagaaaagctaaacagaagcattctcagaaacttctctgtgatgtttgtgttcaactcccagagtttcacgttgcttttcatagagtagttctgaaacatgcttttcgtagtgtctgcaagtggacatttggagcgctttcaggcctgtggtggaaaacgaattatggtcacataaaaactggagagaagccttctcagaaacttctctgtgatgattgcattcaactcacagagttgaaccctcctatggatagagcagtgttgaaactctctttttgtggaatctgcaagtggatatgtggacctctccgaagatgtctttggaaacgggaatatcttcacataaaaactaaacagaagcagtctcagaatcttctttgtgatgtttgcattcaaatcccagagttgaaccttcctttgatagttcaggtttgaaacactctttttgtaggatctgcaagtggatatttggaccactctgtgtccttcgttcgaaacgggtacatcttcgcataaaatctagacagaagcattctcagaaaatactttgtgatgattgagttgaactcacagagctgaacattcctttggatggagcaggtttgagacacactttttgtagaatctacaagtggatatttggacctctctgaggatttcgttggaaacgggataactgcacctaactaaacagaagcattctcagaaactgctttgtgatgattgcattcacctcacagagttgaccattcctattgatagagcagtttggaaacactcttgttgtggaatgtgcaagtggagatttggagcgctttgaggcctatggtagtaaagggaatagcttcatagaaaaactagacagatgcattctcaggaaccttttggtgatgtttgtattcaactcccagagttgaactttcctttggaaagagcagctatgaaacactctttttctagaatctgcaagtggacgtttggagggctttgtggtttgtggtggaaaaggaaatatcttcacctaaatactagatagaagcattctcagaagcttctctgtgatgactgcattcaactcacggagttgaacactccttttgagagcgcagttttgaaactctctttctgtggcatctgcaaggggacatgtagacctctttgaagatttcgttggaaacggaatcatcttcacataaaaactatacagaagcagtctcagaatcttctttgtgatgtttgcattcatatcccagagttgaactttcctttcaaagttcacgtttgaaacactctttttgcaggatctacaagtggatatttggaccactctgtgtccttcgttcgaaacgggtatatcttcacatgacatctagacagaagctttctcagaaaattctttgggatgattgagtggaactcacagagctgaacattccttgcgatgtagcagtttagaaacacactttctgcagaatctgcaagtgcatatgtggacctctctgaggaattcgttggaaacgggataatttcagctgactaaacagaagcattctcagaaccttcttcgtgatgtctgcattcaactcacagtgtggaacctttctttgatagttcaggtttgaaacactctttttgtagaaactgcaaggggatcattgcacttctttgaggcctaccgtagtaaaggaaataacttcctataaaaagaagacagaagcattctcagaaccctcttcgtgatgtttgcattcaactcacagtgctgaacctttctttgatagttcagctttgaaacactctttttgtagaaactgcaagtggatatttggtcctctctgaggatttcgttggaaacgggataaaccgcacagaactaaacagaagcattctcagaaccttcttcgtgatgtttgcattcaactcacagtgttgaacctttctttgatagttcaggtttgaaacggtctttctgtagaaactgcaagtagatatttggaccgctctgaggatttcgttggaaacgggataacccgcacagaactaaaacagaagcattcacagaaaactcttggtgacgactgagtttaactcacagagctgaacattcctttggatggagcagtttcgaaacacactatttgtagaatgtgcaagtggatatttaggcctctctgaggatttcgttggaaacgggataaaccgcacagaactaaacagaagcattctcagaaactactttgtgatgattgcattcaagtcacagagttgaacattccctttgacagagcagtttggaaactctctttgtgtagaatctgcaagtggagatatggaccgctttgaggcctatggtagtaaaggaaatagcttcatataaaagctagacagtagcattctcagaaacttctttgtgatgcttgcattcaactcacagagttgaactttcctttcgagagagaagctttgaaacactctttttccagaatgtgcaagtggacatttggggagctttgaggcctggggtggaaaaggaattatcttcccgtaaaagctagatagaagcattgtcagaaacttctttgtgatgattgcattcaactgacagagttgaaggttgcttttcaaacagcagtttccaaacactctttctgtggaatctgcaagtggatatttggacctctttgaagatttcgttggaaacgggataaccttcacagaaaagctaaacagaagcattctcagaaacttctctgtgatgtttgtgttcaactcccagagtttcacgttgcttttcatagagtagttctgaaacatgcttttcgtagtgtctgcaagtggacatttggagcgctttcaggcctgtggtggaaaacgaattatggtcacataaaaactggagagaagccttctcagaaacttctctgtgatgattgcattcaactcacagagttgaaccctcctatggatagagcagtgttgaaactctctttttgtggaatctgcaagtggatatgtggacctctccgaagatgtctttggaaacgggaatatcttcacataaaaactaaacagaagcattctcagaaacttcttggtgatgtttgcattcaaatcccagagttgaaccttcctttgatagttcaggtttgaaacactctttttgtaggatctgcaagtggctatttggaccactcagtggccttcgttcgagacgggtatatcttcgcataaaatctagacagaagcattctcagaaaatactttgtgatgattgagtttaaatcacagagctgaccattcctttggatggagcaggtttgagacacactttttgtagaatctacaagtggatatttggacctctctgaggatttcgttggaaacgggataactgcacctaactaaacggaagcattctcagaaactgctttgtgatgattgcattcacctcacagagttgaacattcctattgatagaggcagtttggaaacactcttgttgtggaatgtgcaagtggagatttggagcgctttgaggcctatggtagtaaagggaatagcttcatagaaaaactagacagatgcattctcaggaactttttggtgatgtttgtattcaactcccagagttgaactttcctttggaaagagcagctatgaaacactctttttctagaatctgcaagtggacagtttggagggctttgtggtttgtggtggaaaaggaaatatcttcacctaaatactagatagaagcattctcagaagcttctctgtgatgactgcattcaactcacggagttgaacactccttttgagagcgcagttttgaaactctctttctgtggcatctgcaaggggacatgtagaactctttgaagatttcgttggaaacggaatcatcctcacatcaaaactatacagaagcagtctcagaatcttctttgtgatgtttgcattcaaatcccagagttgaactttcctttcaaagttcacgtttgaaacactctttttgcaggatctacaagtggatatttggaccactctgtgtccttcgttcgaaacgggtatatcttcacacgacatctagacagaagctttctcagaaaattctttgggatgattgagttgaactcacagagctgaacattccttgcgatggagcagtttagaaacacactttctgcagaatctgcaagtgcatatttggacctctttgaggaattcgttggaaacgggataatttcagctgactaaacagaagcattctcaggaaccttcttcgtgatgtctgcattcaactcacagtgtggaacctttctttgatagttcaggtttgaaacactctttttgtagagactgcaaggggataattgcacttctttgaggcctaccgtagtaaaggaaataacttcctataaaaagaagacagaagcattctcagaaccctcttcgtgatgtttgcattcaactcacagtgctgaacctttctttgatagttcagctttgaaacactcttcttgtagaaactgcaagtggatatttggtcctctctgaggatttcgttggaaacgggataaaccgcacagaactaaacagaagcatcctcagaaccttcttcgtgatgtttgcattcaactcacagtgctgaacctttctttgatagttcagctttgaaacactctttttgtagaaactgcaagtggatatttggacctctctgaggatttcgttggaaacgggataaaccgcacagaactaaaacagaagcattcacagaaaacacttggtgacgactgcgtttaactcacagagctgaaaatccctttggatggagcagtttcgaaaaacactatttgtagaatgtgcaagtggatatttgggcctctctgaggatttcgttggaaacgggataaaccacacagaactaaacagaagcattctcagaaactactttgtgatgattgcattcaagtcacagagctgaacattccctttgacggagcagtttggaaactctctttgtgtagaatctgcaagtggagatatggaatgctttgaggactatggtagtaaaggaaatagcttcatataaaagctagacagtagcattctcagaaacttctttgtgatgcttgcattcaactcacagagttgaactttcctttcgagagagaagctttgaaacactctttttccagaatctgcaagtggacatttggagggctttgaggcctgtggtggaaaaggaattaacttcccgtaaaagctagatagaagcattgtcagaaacttctttgtgatgattgcattcaactcacagagttgaaggttccttttcaaacagcagtttccaatcactctttctgtggaatctgcaagtggatatttggacctctttgaagatttcgttggaaacgggagaatcttcacagaaaagctaaacagaagcattctcagaaacttctctgtgatgtttgtgtttaactcccagagtttcacattgcttttcatagagtagttctgaaacatgcttttcgtagtgtctgcaagtggacatttggagcgctttcaggtctgtggtggaaaacgaattatggtcacataaaaactggagagaagccttctcagaaacttctctgtgatgattgcattcaactcacagagttgaaccctcctatggatagagcagtgttgaaactctctttttgtggaatctgcaagtggatatgtggacctctccgaagatgtctttggaaacgggaatatcttcacataaaaactaaacagaagcattctcagaaacttcttggtgatgtttgaattcaaatcccagagttgaaccttcctttgatagttcaggtttgaaacactctttttgtaggatctgcaagtggctatttggaccactctgtggccttcattcgaaacgggtatatcttcgcataaaatctagacagaagcattctcagaaaatactttgtgatgattgagtttaactcacagagctgaacattcctttggatggagcaggtttgagacacactttttgtagaatctacaagtggatatttggacctctctgaggatttcgttggaaacgggataactgcacctaactaaacggaagcattctcagaaactgctttgtgatgattgcattcacctcacagagttgaacattcctattgatagagcagtttggaaacactcttgttgtggaatgtgcaagtggagatttggagcgctttgaggcctgtggtagtaaagggaatagcttcatagaaaaactagacagatgcattctcaggaactttttggtgatgtttgtattcaactcccagagttgaactttcctttggaaagagcagctatgaaacactctttttctagaatctgcaagtggacgtttggagggttttgtggtttgtggtggaaaaggaaatatcttcacctaaatactagatagaagcattctcagaagcttctctgtgatgactgcattcaactcacggagttgaacactccttttgagagcgcagttttgaaactccctttctgtggcatctgcaaggggacatgtagacctctttgaagatttcgttggaaacggaatcatcttcacataaaaactatacagaagcagtctcagaatcttctttgtgatgtttgcattcaaatcccagagttgaactttcctttcaaagttcacgtttgaaacactctttttgcaggatctacaagtggatatttggaccactctgtgtccttcgttcgaaacgggtatatcttcacaggacatctagacagaagctttctcagaaaattctttgggatgattgagtggaactcacagagctgaacattccttgcgatgtagcagtttagaaacacactttctgcagaatctgcaagtgcatatttggacctctctgaggaattcgttggaaacgggataatttcagctgactaaacagaagcattctcagaaccttcttcgtgatgtctgcattcaactcacagtgtggaacctttctttgatagttcaggtttgaaacactctttttgtagaaactgcaaggggataattgcacttctttgaggcctaccgtagtcaaggaaataacttcctatagaaagaagacagaagaattctcagagccctcttcgtgatgtttgcattcaactcacagtgctgaacctttctttgatagtgcagctttgaaacactctttttgtagaaactgcaagtggatatttggtcctctctgaggatttcgttggaaacgggataaaccgcacagaactaaaacagaagcattctcagaaccttcttcgtgatgtttgcattcaactcacagtgttgaacctttctttgatagttcaggttggaaacggtctttctgtagaaactgcaagtagatatttggacctctctgaggatttcgttggaaacgggataaaccgcacagaactaaaacagaagcattcacagaaaactcttggtgacgactgagtttaactcacagagctgaagattcctttgaatggagcagtttcgaaacacactatttgtagaatctgcaagtggatatttgggcctctctgaggatttcgttgcaaacgggataaaccgcactgaactaaacagaagcattctcagaaactactttgtgatgattgcattcaagtcacagagttgaacattccctttgacagagcagtttggaaactctctttgtgtagaatctgcaagtggagatatggaccgctttgaggcctatggtagtaaaggaaatagcttcatataaaagctagacagtagcattctcagaaacttctttgtgatgcttgcattcaactcacagagttgaactttcctttcgagagagaagctttgaaacactctttttccagaatctgcaagtggacatttggagggctttgaggcctgtggtggaaaaggaattatcttcccgtaaaagctagatagaagcattgtcagaaacttctttgtgatgattgcattcaactcacagagttgaaggttccttttcaaagagcagtttccaatcactctttctgtggaatctgcaagtggatatttggacctattttgaagatttcgttggaaacgggagaatcttcacaggaaagctaaacagaagcattctcagaaacttctctgtgatgtttgtgttcaactcccagagtttcacattgcttttcatagagtagttctgaaacatgcttttcgtagtgtctacaagtggacatttggagcgctttcaggcctgtggtggaaaacgaattatggtcacataaaaactggagagaagccttctcagaaacttctctgtgatgattgcattcaactcacagagttgaaacctcctatgcatagagcagtgttgaaactctctttttgtggaatctgcaagcggatatgtggacctctccgaagatgtctttggaaacgggaatatcttcacataaaaactaaacagaagcattctcagaaacttcttggtgatgtttgcattcaaatcccagagttgaaccttcctttgagagttcaggtttgaaacactctttttgtaggatctgcaagtggatatttggaccactctgtggccttcgttcgaaacgggtacatcttcgcataaaatctagacagaagcattctcagaaaatactttgtgatgattgagtttaaatcacagagctgaccattcctttggatggagcaggtttgagacacactttttgtagaatctacaagtggatatttggacctctctgaggatttcgttggaaacgggataactgcacctaactaaacgggaagcattctcagaaactgctttgtgatgattgcattcacctcacagagttgaacattcctattgatagagcagtttggaaacactcttgttgtggaatgtgcaagtggagatttggagcgctttgaggcctgtggtagtaaagggaatagcttcatagaaaaactagacagatgcattctcaggaactttttggtgatgtttgtattcaactcccagagttgaactttcctttggaaagagcagctatgaaacactctttttctagaatctgcaagtggacgtttggagggctttgtggtttgtggtggaaaaggaaatatcttcacctaaatactagatagaagcattctcagaagcttctctgtgatgactgcattcaactcacggagttgaacactccttttgagagcgcagttttgaaactctctttctgtggcatctgcaaggggacatgtagacctctttgaagatttcgttggaaacggaatcatcttcacatcaaaactatacagaagcagtctcagaatcttctttgtgatgtttgcattcaaatcccagagttgaactttcctttccaagttcacgtttgaaacactctttttgcaggatctacaagtggatatttggaccactctgtgtccttcgttcgaaacgggtatatcttcacatgacatctagacagaagctttctcagaaaattctttgggatgattgagtggaactcacagagctgaacattccttgcgatgtagcagtttagaaacacactttctgcagaatctgcaagtgcatatttggacctctctgaggaattcgttggaaacgggataatttcagctgactaaacagaagcattctcagaaccttcttcgtgatgtctgcattcaactcacagtgtggaacctttctttgatagttcaggtttgaaacactctttttgtagaaactgcaaggggataattgcacttctttgaggcctaccgtagtaaaggaaataacttcctatagaaagaagacagaagcattctcagaactctcttggtgatgtttgcattcaactcacggtgctgaacctttctttgatagttcagctttgaaacactctttttgtagaaactgcaagtggatatttggtcctctctgaggatttcgttggaaacgggataaaccgcacagaactaaacagaagcattctcagaaccttcttcgtgatgtttgcattcaactcacagtgttgaacctttctttgatagttcaggtttgaaacggtctttctgtggaaactgcaagtagatatttggacctctctgaggatttcgttggaaacgggataaaccgcacagaactaaaacagaagcattcacagaaaactcttggtgacgactgagtttaactcacagagctgaatattcctttggatggagcagtttcgaaacacactatttctagaaggtgcaagtggatatgtgggcctctctgaggatttcgttggaaacgggataaaccgcacagaactaaacagaatcattctcagaaactactttgtgatgattgcattcaagtcacagagttgaacattccctttgacagagcagtttggaaactctctttgtgtagaatctgcaagtggagatatggaccgctttgaggcctatggtagtaaaggaaatagcttcatataaaagctagacagtagcattctcagaaacttctttgtgatgcttgcattcaactcacagagttgaactttcctttcgagagagaagctttgaaacactctttttccagaatctgcaagtggacatttggagggcgttgaggcctgtggtggaaaaggaattatcttcccgtaaaagctagatagaagcattgtcagaaacttctttgtgatgattgcattcaactcacagagttgaaggttccttttcaaagagcagtttccaatcactctttctgtggaatctgcaagtggatatttggacctattttgaagatttcgttggaaacgggagaatcttcacaggaaagctaaacagaagcattctcagaaacttctctgtgatgtttgtgttcaactcccagagtttcacattgcttttcatagagtagttctgaaacatgcttttcgtagtgtctacaagtggacatttggagcgctttcaggcctgtggtggaaaacgaattatggtcacataaaaactggagagagccttctcagaaacttctctgtgatgattgcattcaactcacagagttgaaccctcctatggatagagcagtgttgaaactctctttttgtggaatctgcaagtggatatgtggacctctccgaagatgtctttggaaacgggaatatcttcacataaaaactaaacagaagcattctcagaaacttcttggtgatgtttgcattcaaatcccagagttgaaccttcctttgatagttcaggtttgaaacactctttctgtaggatctgcaagtggctatttggaccactctgtggccttcgttcgaaacgggtatatcttcgcataaaatctagacagaagcattctcagaaaatactttgtgatgattgagtttaaatcacagagctgaccattcctttggatggagcaggtttgagacacactttttgtagaatctacaagtggatatttggacctctctgaggatttcgttggaaacgggataactgcacctaactaaacggaagcattctcagaaactgctttgtgatgattgcattcacctcacagagttgaacattcctattgatagagcagtttggaaacactcttgttgcggaatgtgcaagtggagatttggagcgctttgaggcctgtggtagtaaagggaatagcttcatagaaaaactagacagatgcattctcaggaactttttggtgatgtttgtattcaactcccagagttgaactttcctttggaaagagcagctatgaaacactctttttctagaatctgcaagtggacgtttggagggctttgtggtttgtggtggaaaaggaaatatcttcacctaaatactagatagaagcattctcagaagcttctctgtgatgactgcattcaactcacggagttgaacactccttttgagagcgcagttttggaactccctttctgtggcatctgcaaggggacatgtagacctctttgaagatttcgttggaaacggaatcatcttcacatcaaaactatacagaagcagtctcagaatcttctttgtgatgtttgcattcaaatcccagagttgaactttcctttccaagttcatgtttgaaacactctttttgcaggatctgcaagtggatatttggaccactctgtgtccttcgttcgaaacgggtatatcttcacatgacatctagacagaagctttctcagaaaattctttgggatgattgagtggaactcacagagctgaacattccttgcgatgtagcagtttagaaacacactttctgcagaatctgcaagtgcatatttggaccctctctgaggaattcgttggaaacgggataatttcagctgactaaacagaagcattctcagaaccttcttcgtgatgtctgcattcaactcacagtgtggaacctttctttgatagttcaggtttgaaacactctttttgtagaaactgcaaggggataattgcacttctttgaggcctaccgtagtaaaggaaataacttcctatagaaagaagacagaagcattctcagaaccctcttcgtgatgtttgcattcaactcacagtgctgaacctttctttgatagttcagctttgaaacactcttcttgtagaaactgcaagtggatatttggtcctctctgaggatttcgttggaaacgggataaaccgcacagaactaaacagaagcattctcagaaccttcttcgtgatgtttgcattcaactcacagtgttgaacctttctttgatagttcaggttggaaacggtctttctgtagaaactgcaagtagatatttggacctctctgaggatttcgttggaaacgggataaaccgcacagaactaaaacagaagcattcacagaaaactcttggtgacgactgagtttaactcacagagctgaacattcctttggatggagcagtttcgaaacacactatttgtagaatgtgcaagtggatatttgggcctctctgaggatttcgttggaaacgggataaaccgcacagaactaaacagaagcattctcagaaactactttgtgatgattgcattcaagtcacagagttgaacattccctttgacagagcagtttggaaactctctttgtgtagaatctgcaagtggagatatggaccgctttgaggcctatggtagtaaaggaaatagcttcatataaaagctagacagtagcattctcagaaacttctttgtgatgcttgcattcaactcacagagttgaactttcctttcgagagagaagctttgaaacactctttttccagaatgtgcaagtggacatttggagggctttgaggcctgcggtggaaaaggaattatcttcccgtaaaagctagatagaagcattgtcagaaacttctttgtgatgattgcatacaagtcacagagttgaaggttccttttcaaagagcagtttccaatcactctttctgtggaatctgcaagtggatatttggacctctttgaagatttcgttggaaacgggagaatcttcacagaaaagctaaacagaagcattctcagaaacttctctgtgatgtttgtgttcaactcccagagtttctcattgcttctcatagagtagttctgaaacatgcttttcgtagtgtctgcaagtggacatttggagcgctttcaggcctgtggtggaaaacgaattatggtcacatgaaaactggagagaagccttctcagaaacttctctgtgatgattgcattcaactcacagagttgaaccctcctatggatagagcagtgttgaaactctctttttgtggaatctgcaagcggatatgtggacctctccgaagatgtctttggaaacgggaatatcttcacataaaaactaaacagaagcattctcagaaacttcttggtgatgtttgcattcaaatcccagagttgaaccttcctttgagagttcaggtttgaaacactctttttgtaggatctgcaagtggatatttggaccactctgtggccttcgttcgaaacgggtacatcttcgcataaaatctagacagaagcattctcagaaaatactttgtgatgattgagtttaactcacagagctgaacattcctttggatggagcaggtttgagacacactttttgtagaatctacaagtggatatttggacctctctgaggatttcgttggaaacgcgataactgcacctaactaaacggaagcattctcagaaactgctttgtgatgattgcattcacctcacagagttgaacattcctattgatagagcagtttggaaacactcttgttgtggaatgtgcaagtggagatttggagcgctttgaggcctatggtagtaaagggaatagcttcatagaaaaactagacagatgcattctcaggaactttttggtgatgtttgtattcaactcccagagttgaactttcctttggaaagagcagctgtgaaacaatctttttctagaatctgcaagtggacgtttggagggctttgtggtttgtggtggaaaaggaaatatcttcacctaaatagtagagagaagcattctcagaagcttctctgtgatgactgcattcaactcacggagttgaacactccttttgagagcgcagttttgaaactctctttctgtggcatctgcaaggggacatgtagacctctttgaaaatttcgttggtaacggaatcatcttcacatcaaaactatacagaagcagtctcagaatcttctttgtgatgtttgcattcaaatcccagagttgaactttcctttcaaagttcacgtttgaaacactctttttgcaggatctacaagtggatatttggaccactctgtgtccttcgttcgaaacgggtatatcttcacatgacatctagacagaagctttctcagaaaattgtttgggatgattgatttgaactcacagagctgagcattccttgcgatgtagcagtttagaaacacactttctgcagaatctgcaagtgcatatttggacctctctgaggaattcgttggaaacgggataatttcagctgactaaacagaagtattctcagaaccttcttcgtgatgtctgcattcaactcacagtgtggaacctttctttgatagttcaggtttgaaacactctttttgtaggaactgcaaggggataattgcactctttgaggagtaccgtagtaaaggaaataacttcctataaaaagaagacagaagcattctcagaaccctcttcgtgatgtttgcattcaactcacagtgctgaacctttctttgatagttcagctttgaaacactccttttgtagaaactgcaaatggatatttggtcctctctgaggatttcgttggaaaagggataaaacgcacagaactaaacagaagcattcacagaaaactcttggtgacgactgagtttaactcacagagctgaacattcctttggatggagcagtttcaaaacacactatttgtagaatctgcaagtggatatgtgggcctctctgaggatttcgttggaaacgggataaaccgcacagaactaaaacagaagcattctcagaaactactttgtgatgattgcattcaagtcacagagttgaacattccctttgacagagcagtttggaaactctctttgtgtagaatctgcaagtggagatatggaccgctttgaggcctatggtagtaaaggaaatagcttcatataaaagctagacagtagcattctcagaaacttctttgtgatgcttgcattcaactcacagagttgaactttcctttcgagagagaagctttgaaacactcttttccagaaactgcaagtggacatttggagggcattgaggcctgtggtggaaaaggaattatcttcccgtaaaagctagacagaagcattgtcagaaacttctttgtgatgattgcattcaactcacagagttgaaggttccttttcaaacagcagtttccaatcactctttctgtggaatctgcaagtggatatttgggcctctctgaggatttcgttggaaacgggataaaacgcacagaactaaaacagaagcattctcagaaacttctctgtgatgtttgtgttcaactcccagagtttcacgttgcttttcatagagtagttctgaaacatgcttttcgtagtgtctgcaagtggacatttggagcgctttcaggcctgtggtggaaaacgaattatggtcacataaaaactggagagaagccttctcagaaacttctctgtgatgattgcattcaactcacagagttgaaccctcctatggatagagcagtgttcaaactctctttttgtggaatctgcaagtggatatgtggacctctccgaagatgtctttggaaacgggaatatcttcacataaaaactaaacagaagcattctcagaaacttcttggtgatgtttgcattcaaatcccagagttgaaccttcctttgatagttcaggtttgaaacactctttctgtaggatctgcaagtggctatttggaccactctgtggccttcgttcgaaacgggtatatcttcgcataaaatctagacagaagcattctcagaaaatactttgtgatgattgagtttaaatcacagagctgaacattcctttggatggagcaggtttgagacacactttttatagaatctacaagtggatatttggacctctctgaggatttcgttggaaacgggataactgcacctaactaaacggaaagcattctcagaaactgctttgtgatgattgcattcacctcacagtagttgaacattcctattgatagagcagtttggaaacactcttgttgtggaatgtgcaagtggagatttggagcgctttgaggcctatggtagtaaagggaatagcttcatagaaaaactagacagatgcattctcaggaactttttggtgatgtttgtattcaactcccagagttgaactttcctttggaaagagcagctatgaaacactctttttctagaatctgcaagtggacgtttggagggctttgtggtttgtggtggaaaaggaaatatcttcacctaaatactagatagaagcatcctcagaagcttctctgtgatgactgcattcaactcacggagttgaacactccttttgagagcgcagttttgaaactctctttctgtggcatctgcaaggggacatgtagacctctttgaagatttctttggaaacggaatcatcttcacataaaaactatacagaagcagtctcagaatcttctttgtgatgtttgcattcaaatcccagagttgaactttcctttcaaagttcacgtttgaaacactctttttgcaggatctacaagtggatatttggaccactctgtgtccttcgttcgaaacgggtatatcttcacaggacatctagacagaagctttctcagaaaattctttgggatgattgagttgaactcacagagctgaacattccttgcgatgtagcagtttagaaacacactttctgcagaatctgcaagtgcatatttggacctctctgaggaattcgttggaaacgggataatttcagctgactaaacagaagcattctcagaaccttcttcgtgatgtctgcattcaactcacagtgtggaacctttctttgatagttcaggtttgaaacactctttttgtagaaactgcaaggggataattgcacttctttgaggcctaccgtagtaaaggaaataacttcctatagaaagaagacagaagcattctcagaaccctcttcgtgatgtttgcattcaactcacagtgctgaacctttctttgatagttcagctttgaaacactcttcttgtagaaactgcaagtggatatttggtcctctctgaggatttcgttggaaacgggataaaccgcacagaactaaacagaagcattctcagaaccttcttcgtgatgtttgcattcaactcacagtgttgaacctttctttgatagttcaggtttgaaacggtctttctgtagaaactgcaagtagatatttggacctctctgaggatttcgttggaaacgggataacccgcacagaactaaaacagaagcattcacagaaaactcttggtgacgactgagtttaactcacagagctgaacattccctttggatggagcagtttcgaaacacactatttgtagaatgtgcaagtggatatttaggcctctctgaggatttcgttggaaacgggataaaccgcacagaactaaacagaagcattctcagaaactactttgtgatgattgcattcaagtcacagagttgaacattccctttgacagagcagtttggaaactctctttgtgtagaatctgcaagtggagatatggaccgctttgaggcctatggtagtaaaggaaatagcttcatataaaagctagacagtagcattctcagaaacttctttgtgatgcttgcattcaactcacagagttgaactttcctttcgagagagaagctttgaaacactctttttccagaatctgcaagtggacatttggagggctttgaggcctgtggtggaaaaggaattatcttcccgtaaaagctagatagaagcattgtcagaaacttctttgtgatgattgcattcaactcacagagttgaaggttccttttcaaacagcagtttccaatcactctttctgtggaatctgcaagtggatatttgggcctctctgaggatttcgttggaaacgggataaaacgcacagaactaaaacagaagcattctcagaaacttctctgtgatgtttgtgttcaactcccagagtttcacattgcttttcatagagtagttctgaaacatgcttttcgtagtgtctgcaagtggacatttggagcgctttcaggcctgtggtggaaaaccgaattatggtcacataaaaactggagagaagccttctcagaaacttctctgtgatgattgcattcaactcacagagttgaaccctcctatggatagagcagtgttgaaactctctttttgtggaatctgcaagtggatatgtggacctctccgaagatgtctttggaaacgggaatatcttcacataaaaactaaacagaagcattctcagaaacttcttggtgatgtttgcattcaaatcccagagttgaaccttcctttggtagttcaggtttgaaacactctttttgtaggatctgcaagtggatatttggaccactctgtggccttcgttcgaaacgggtacatcttcgcataaaatctagacagaagcattctcagaaaatactttgtgatgattgagttgaactcacagagctgaacattcctttggatggagcaggtttgagacacactttttgtagaatctacaagtggatatttggacctctctgaggatttcgttggaaacgggataactgcacctaactaaacggaagcattctcagaaactgctttgtgatgattgcattcacctcacagagttgaacattcctattgatagagcagtttggaaacactcttgttgtggaatgtgcaagtggagatttggagcgctttgaggcctatggtagtaaagggaatagcttcatagaaaaactagacagatgcattttcaggaactttttggtgatgtttgtattcaactcccagagttgaactttcctttggaaagagcagctatgaaacactctttttctagaatctgcaagtggacgtttggagggctttgtggtttgtggtggaaaaggaaatatcttcacctaaatactagatagaagcattctcagaagcttctctgtgatgactgcattcaactcacggagttgaacactccttttgagagcgcagttttgaaactctctttctgtggcatctgcaaggggacatgtagacctctttgaagatttcgttggaaacggaatcatcttcacataaaaactatacagaagcagtctcagaatcttctttgtgatgtttgcattcaaatcccagagttgaactttcctttcaaagttcacgtttgaaacactctttttgcaggatctacaagtggatatttggaccactctgtgtccttcgttcgaaacgggtatatcttcacatgacatctagacagaagctttctcagaaaattctttgggatgattgagtggaactcacagagctgaacattccttgcgatgtagcagtttagaaacacactttctgcagaatctgcaagtgcatatttggacctctctgaggaattcgttggaaacgggataatttcagctgactaaacagaagcattctcagaaccttcttcgtgatgtctgcattcaactcacagtgtggaacctttctttgatagttcaggtttgaaacactctttttgtagaaactgcaaggggataattgcacttctttgaggcctaccgtagtaaaggaaataacttcctatagaaagaagacagaagaattctcagagccctcttcgtgatgtttgcattcaactcacagtgctgaacctttctttgatagtgcagctttgaaacactctttttgtagaaactgcaagtggatgtttggtcctctctgaggatttcgttggaaacgggataaaccgcacagaactaaaacagaagcattctcagaaccttcttcgtgatgtttgcattcaactcacagtgttgaacctttctttgatagttcaggtttgaaacggtctttctgtagaaactgcaagtagatatttggacctctctgaggatttcgttggaaacgggataacccgcacagaactaaaacagaagcattcacagaaaactcttggtgacgactgagtttaactcacagagctgaacattcctttggatggagcagtttcaaaacacactatttgtagaatctgcaagtggatatgtgggcctctctgacgatttcgttggaaacgggataaaccgcacagaactaaaacagaagcattctcagaaactactttgtgatgattgcattcaagtcacagagttgaacattccctttgacagagcagtttggaaactctctttgtgtagaatctgcaagtggagatatggaccggtttgaggcctatggtagtaaaggaaatagcttcatataaaagctagacagtagcattctcagaaacttctttgtgatgcttgcattcaactcacagagttgaactttcctttcgagagagaagctttgaaacactctttttccagaatgtgcaagtggacatttggggagctttgaggcctgtggtggaaaaggaattatcttcccgtaaaagctagatagaagcattgtcagaaacttctttgtgatgattgcattcaactctcagagttgaaggttccttttcaaacagcagtttccaaacactctttctgtggaatctgcaagtggatatttggacctctttgaagatttcgttggaaacgggataaccttcacagaaaagctaaacagaagcattctcagaaacttctctgtgatgtttgtgttcaactcccagagtttcacagtgcttctcatagagtagttctgaaacatgcttttcgtagtgtctgcaagtggacatttggagcgctttcaggcctgtggtggaaaacgaattatggtcacataaaaactggagagaagccttctcagaaacttctctgtgatgattgcattcaactcacagagttgaactctcctatggatagagcagtgttgaaactctctttttgtggaatctgcaagtggatatgtggacctctccgaagatgtctttggaaacgggaatatcttcacataaaaactaaacagaagcattctcagaaacttcttggtgatatttgcattcaattcccagagttgaacattcctttgatagttcaggtttgaaacactctttttgtaggatctgcaagtggatatttggaacactctgtggccttcgttcgaaacgggtacatcttcgcataaaatctacacagaagcattctcagaaaatactttgtgatgattgagtttaactcacagagctgaacattcctttagatggagcaggtttgagacacactttttgtagaatctacaagtggatatttggacctctctgaggatttcgttggaaacgggataactgcacctaactaaacggaagcattctcagaaactgctttgtgatgattgcattcacctcacagagttgaacattcctattgatagagcagtttggaaacactcttgttgtggaatgtgcaagtggtgatttggagcactttgaggcctatggtagtaaagggaatagcttcatagaaaaactagacagatgcattctcaggaactttttggtgatgtttgtattcaactcccagagttgaactttcctttggaaagagcagctatgaaacactctttttctagaatctgcaagtggacgtttggagggctttgtggtttgcggtagaaaaggaaatatcttcacctaaatactagatagaagcattctcagaagcttctctgtgatgactgcattcaactcacggagttgaacactccttttgagagcgcagttttgaaactctctttctgtggcatctgcaaggggacatgtagacctctttgaagatttcgttggaaacggaatcatcttcacataaaaactatacagaagcagtctcagaatcttctttgtgatgtttgcattcaaatcccagagttgaactttcctttcaaagttcacgtttgaaacactctttttgcaggatctacaagtggatatttggaccactctgtgtccttcgttcgaaacgggtatatcttcacatgacatctagacagaagctttctcagaaaattctttgggatgattgagtggaactcacagagctgaacattccttgcgatgtagcagtttagaaacacactttctgcagaatctgcaagtgcatatttggacctctctgaggaattcgttggaaacgggataatttcagctgactaaacagaagcattctcagaaccttcttcgtgatgtctgcattcaactcacagtgtggaacctttctttgatagttcaggtttgaaacactctttttgtagaaactgcaaggggataattgcacttctttgaggcctaccgtagtaaaggaaataacttcctataaaaagaagacagaagcattctcagaaccctcttcgtgatgtttgcattcaactcacagtgctgaacctttctttgatagttcagctttgaaacactcttcttgtagaaactgcaagtggatatttggtcctctctgaggatttcgttggaaacgggataaaccgcacagaactaaacagaagcattctcagaaccttcttcgtgatgtttgcattcaactcacagtgttgaacctttctttgatagttcaggtttgaaacggtctttctgtagaaactgcaagtagatatttggacctctctgagtatttctttggaaacgggataaaccgcacagaactaaaacagaagcattcacagaaaactcttggtgacgactgagtttaacgcacagagctgaacattcctttggatggagcagtttcgaaacacactatatgtagaatgtgcaagtggatatttgggcctctctgaggatttcgttggaaacgggataaaccgcacagaactaaacagaagcattctcagaaactactttgtgatgattgcattcaagtcacagagttgaacattccctttgacagagcagtttggaaactctctttgtgtagaatctgcaagtggagatatggaccgctttgaggcctatggtagtaaaggaaatagcttcatataaaagctagacagtggcattctcagaaacttctttgtgatgcttgcattcaactcacagagttgaactttcctttcgagagagaagctttgaaacactctttttccagaatctgcaagtggacttttggagggctttgaggcctgtggtgaaaaggaattatcttcccataaaagctagatagaagcattgtcagaaacttctttgtgatgattgcattcaactcacagtagttgaaggttccttttcaaagagcagtttccaatcactctttctgtggaatctgcaagtggatatttggacctattttgaagatttcgttggaaacgggagaatcttcacaggaaagctaaacagaagcattctcagaaacttctctgtgatgtttgtgttcaactcccagagtttcacattgcttttcatagagtagttctgaaacatgcttttcgtagtgtctgcaagtggacatttggagcgctttcaggcctgtggtggaaaacgaattatggtcccataaaaactggagagaagccttctcagaaacttctctgtgatgattgcattcaactcacagatttgaaccctcctatggatagagcattgttgaaactctctttttgtggaatctgcaagtggatatgtggacctctccgaagatgtctttggaaacgggaatatcttcacataaaaactaaacagaagcattctcagaaacttcttggtgatgtttgcattcaaatcccagagttgaaccttcctttgatagttcaggtttgaaacactctttttgtaggatctgcaagtggatatttggaccactctgtggccttcgttcgaaacgggtacatcttcgcataaaatctagacagaagcattctcagaaaatactttgtgatgattgagtttaactcacagagctgaacattcctttggatggagcaggcttgagacacactttttgtagaatccacaagtggatatttggacctctctgaggatttcgttggaaacgggataactgcaccgaactaaacggaagcattctcagaaactgctttgtgatgattgcattcacctcacagagttgaacattcctattgatagagcagtttggaaacactcttgttgtggaatgtgcaagtggagatttggagcgctttgaggtctatggtagtaaagggaatagcttcatagaaaaactagacagatgcattctcaggaaccttttggtgatgtttgtattcaactcccagagttgaactttcctttggaaagagcagctatgaaacactctttttctagaatctgcaagtggacgtttggagggctttgtggtttgtggtggaaaaggaaatatcttcacctaaatactagatagaagcattctcagaagcttctctgtgatgactgcattcaactcacggagttgaacactccttttgagagcgtagttttgaaactctctttctgtggcatctgcaaggggacatgtagacctctttgaagatttcgttggaaacggaatcatcttcacataaaaactatacagaagcagtctcagaatcttctttgtgatgtttgcattcaaatcccagagttgaactttcctttccaagttcacgtttgaaacactctttttgcaggatctacaagtggatatttgtaccactctgtgtccttcgttcgaaacgggtatatcttcacatgacatctagacagaagctttctcagaaaattctttgggatgattgagttgaactcacagagctgaacattccttgcgatgtagcagtttagaaacacactttctgcagaatctgcaagtgcatatgtggacctctctgaggaattcgttggaaacgggataatttcagctgactaaacagaagcattctcagaaccttcttcgtgatgtctgcattcaactcacagtgtggaacctttctttgatagttcaggtttgaaacactctttttgtagaaactgcaaggggataattgcacttctttgaggcctaccgtagtaaaggaaataacttcctataaaaagaagacagaagcattctcagaaccctcttcgtgatgtttgcattcaactcacagtgctgaacctttctttgatagttcagctttgaaacactcttcttgtagaaactgcaagtggatatttggtcctctctgaggatttcgttggaaacgggataaaccgcacagaactaaacagaagaattctcagagccctcttcgtgatgtttgcattcaactcacagtgctgaacctttctttgatagtgcagctttgaaacactctttttgtagaaactgcaagtggatatttggtcctctctgaggatttcgttggaaacgggataaaccgcacagaactaaaacagaagcattcacagaaaactcttggtgacgactgagtttaactcacagagctgaacattcctttggatggagcagtttcgaaacacactatttgtagaatctgcaagtggatatttgggcctctctgaggatttcgttggaaacgggataaaacgcacagaagtaaaacagaagcattctcagaaactactttgttatgattgcattcaagtcacagagttgaacattccctttgacagagcagtttggaaactctctttgtgtagaatctgcaagtggagatatggaccgctttgaggcctatggtagtaaaggaaatagcttcatataaaagctagacagtagcattctcagaaacttctttgtgatgcttgcattcaactcacagagttgaactttcctttcgagagagaagctttgaaacactctttttccagaatctgcaagtggacatttggagggctttgaggcctgtggtggaaaaggaattatcttcccgtaaaagctagatagaagcattgtcagaaacttctttgtgatgattgcattcaactcacagagttgaaggttccttttcaaacagcagtttccaatcactctttctgtggaatctgcaagtggatatttgggcctctctgaggatttcgttggaaacgggataaaacgcacagaactaaaacagaagcattctcagaaacttctctgtgatgtttgtgttcaactcccagagtttcacgttgcttttcatagagtagttctgaaacatgcttttcgtagtgtctgcaagtggacatttggagtgctttcaggcctgtggtggaaaacgaattatggtcacataaaaactggagagaagccttctcagaaacttctctgtgatgattgcattcaactcacagagttgaaccctcctatggatagagcagtgttgaaactctctttttgtggaatctgcaagtggatatgtggacctctccgaagatgtctttggaaacgggaatatcttcacataaaaactaaacagaagcattctcagaaacttcttggtgatgtttgcattcaaatcccagagttgaaccttcctttgatagttcaggtttgaaacactctttttgtaggatctgcaagtggctatttggaccactctgtggccttcgttcgaaacgggtatatcttcgcataaaatctagacagaagcattctcagaaaatactttgtgatgattgagtttaaatcacagagctgaccattcctctggatggagcaggtttgagacacactttttgtagaatctacaagtggatatttggacctctctgaggatttcgttggaaacgggataactgcacctaactaaacggaagcattctcagaaactgctttgtgatgattgcattcacctcacagagttgaacattcctattgatagagcagtttggaaacactcttgttgtggaatgtgcaagtggagatttggagcgctttgaggcctatggtagtaaagggaatagcttcatagaaaaactagacagatgcattctcaggaactttttggtgatgtttgtattcaactcccagagttgaactttcctttggaaagagcagctatgaaacactctttttctagaatctgcaagtggacgtttggagggctttgtggtttgtggtggaaaaggaaatatcttcacctaaatactagatagaagcattctcagaagcttctctgtgatgactgcattcaactcacggagttgaacactccttttgagagcgcagttttgaaactctctttctgtggcatctgcaaggggacatgtagacctgtttgaagatttcgttggaaacggaatcaccttcacatcaaaactatacagaagcagtctcagaatcttctttgtggtgtttgcattcaaatcccagagttgaactttcctttcaaagttcacgtttgaaacactctttttgcaggatctacaagtggatatttggaccactctgtgtccttcgttcgaaacgggtatatcttcacatgacatctagacagaagctttctcagaaaattctttgggatgattgagtggaactcacagagctgaacattccttgcgatgtagcagtttagaaacacactttctgcagaatctgcaagtgcatatttggacctctctgaggaattcgttggaaacgggataatttcagctgactaaacagaagcattctcagaaccttcttcgtgatgtctgcattcaactcacagtgtggaacctttctttgatagttcagctttgaaacactctttttgtagaaactgcaaggggatcattgcacttctttgaggcctaccgtagtaaaggaaataacttcctataaaaagaagacagaagcattctcagaaccctcttcgtgatgtttgcattcaactcacagtgctgaacctttctttgatagttcagctttgaaacactctttttgtagaaactgcaagtggatatttggtcctctctgaggatttcgttggaaacgggataaaccgcacagaactaaacagaagcattctcagaaccttcttcgtgatgtttgcattcaactcacaagtgttgaacctttctttgatagttcaggtttgaaacggtctttctgtagaaactgcaagtagatatttggacctctctgaggatttcgttggaaacgggataacccgcacagaactaaaacagaagcattcacagaaaactcatggtgacgaatgagtttaactcacagagctgaacattcctttggatggagcagtttcgaaacacactatttgtagaatgtgcaagtggatatttgggcctctctgaggatttcgttggaaacgggataaaccgcacagacctaaacagaagcattctcagaaactactttgtgatgattgcattcaagtcacagagttgaacattccctttgacagagcagtttggaaactctctttgtgtagaatctgcaagtggagatatggaccgctttgaggcctatggtagtaaaggaaatagcttcatataaaagctagacagtagcattctcagaaacttctttgtgatgcttgcattcaactcacagagttgaactttcctttcgagagagaagctttgaaacactctttttccagaatctgcaagtggacatttggagggctttgaggcctgtggtggaaaaggaattatcttcccgtaaaagctagatagaagcattgtcagaaacttctttgtgatgattgcattcaactcacagagttgaaggtttcttttcaaagagcagtttccaatcactctttctgtggaatctgcaagtggatatttggacctattttgaagatttctttggaaacgggataatcttcacagaaaagctaaacagaagcattctcagaaacttctctgtgatgtttgtgttcaactcccagagtttcacgttgcttttcatagagtagttctgaaacatgcttttcgtagtgtctgcaagtggacatttggagcgctttcaggcctgtggtggaaaacgaattatggtcacataaaaactggagagaagccttctcagaaacttctctgtgatgattgcattcaactcacagagttgaaccctcctatggatagagcagtgttgaaactctctttttgtggaatctgcaagtggatatgtggacctctccgaagatgtctttggaaacgggaatatcttcacataaaaactaaacagaagcattctcagaaacttcttggtgatgtttgcattgaaatcccagagttgaaccttcctttgatagttcaggtttgaaacactctttttgtaggatctgcaagtggatatttggaccactctgtggccttcgttcgaaacggctatatcttcgcataaaatctagacagaagcattctcagaaaatactttgtgatgattgagtttaaatcacagagctgaccattcctttggatggagcaggtttgagacacactttttgtagaatctacaagtggatatttggacctctctgaggatttcgttggaaacgggataactgcacctaactaaacggaagcattctcagaaactgctttgtgatgattgcattcacctcacagagttgaacattcctattgatagagcagtttggaaacactcttgttgtggaatgtgcaagtggagatttggagcgctttgaggcctatggtagtaaagggaatagcttcatagaaaaactagacagatgcattctcaggaaccttttggtgatgtttgtattcaactcccagagttgaactttcctttggaaagagcagctatgaaacactctttttctagaatctgcaagtggacgtttggagggctttgtggtttgtggtggaaaaggaaatatcttcacctaaatactagatagaagcattctcagaagcttctctgtgatgactgcattcaactcacggagttgaacactccttttgagagcgcagttttgaaactctctttctgtggcatctgcaaggggacatgtagacctctttgaagatttcgttggaaacggaatcatcttcacataaaaactatacagaagcagtcacagaatcttctttgtgatgtttgcattcaaatccccgagttgaactttcctttcaaagttcacgtttgaaacactctttttgcaggatctacaagtggatatttggaccactctgtgtccttcgttcgaaacgggtatatcttcacatgacatctagacagaagctttctcagaaaattctttgggatgattgagttcagcaaacagagctgaacactccttgcgatgtagcagtttagaaacacactttctgcagaatctgcaagtgcatatgtggacctctgtgaggaattcgttggaaacgggataatttcagctgactaaacagaagcattctcagaaccttcttcgtgatgtctgcattcaactcacagtgtggaacctttctttgatagttcaggtttgaaacactctttttgtagaaactgcaaggggatcattgcacttctttgaggcctaccgtagtaaaggaaataacttcctataaaaagaagacagaagcattctcagaaccctcttcgtgatgtttgcattcaactcacggtgctgaacctttctttgatagttcagctttgaaacactctttttgtagaaactgcaagtggatatttggtcctctctgaggatttcgttggaaacgggataaaccgcacagaactaaacagaagcattctcagaaccttcttcgtgatgtttgcattcaactcacagtgttgaacctttctttgacagttcaggtttgaaacggtctttctgtagaaactgcaagtagatatttggacctctctgaggatttcgttggaaacgggataaaccgcacagaactaaaacagaagcattcacagaaaactcttggtgacgactgagtttaactcacagagctgaacattcctttggatggagcagtttcgaaacacactatttgtagaatgtgcaagtggatatgtgggcctctctgaggatttcgttggaaacgggataaaccgcacagaactaaacagaagcattctcagaaactactttgtgatgattgcattcaagtcacagagttgaacattccctttgacagagcagtttggaaactctctttgtgtagaatctgcaagtggagatatggaccgctttgaggcctatggtagtaaaggaaatagcttcatataaaagctagacagtagcattctcagaaacttctttgtgatgcttgcattcaactcacagagttgaactttcctttcgagagagaagctttgaaacactctttttccagaatctgcaagtggacatttggagggctttgaggcctgtggtggaaaaggaattatcttcccgtaaaagctagatagaagcattgtcagaaacttctttgtgatgattgcattcaactcacagagttgaaggttccttttcaaacagcagtttccaatcactctttctgtggaatctgcaagtggatatttgggcctctctgaggatttcgttggaaacgggataaaacgcacagaactaaaacagaagcattctcagaaacttctctgtgatgtttgtgttcaactcccagagtttcacattgcttctcatagagtagttctgaaacatgcttttcgtagtgtctgcaagtggacatttggagcgctttcaggcctgtggtggaaaacgaattatggtcacataaaaacgggagagaagccttctcagaaacttctctgtgatgattgcattcaactcacagagttgaaccctcctatggatagagcagtgttgaaactctctttttgtggaatctgcaagcggatatgtggacctctccgaagatgtctttggcaacgggaatatcttcacataaaaactaaacagaagcattctcagaaacttcttggtgatgtttgcattcaaatcccagagttgaaccttcctttgagagttcaggtttgaaacactctttttgtaggatctgcaagtggatatttggaccactctgtggccttcgttcgaaacgggtacatcttcgcataaaatctagacagaagcattctcagaaaatactttgtgatgattgagtttaaatcacagagctgaccattcctttggatggagcaggtttgagacacactttttgtagaatctacaagtggatatttggacctctctgaggatttcgttggaaacgggataactgcacctaactaaacggaagcattctcagaaactgctttgtgatgattgcattcacctcacagagttgaacatccctattgatagagcagtttggaaacactcttgttgtggaatgtgcaagtggagatttggagcgctttgaggcctgtggtagtaaagggaatagcttcatagaaaaactagacagatgcattctcaggaactttttggtgatgtttgtattcaactcccagagttgaactttcctttggaaagagcagctatgaaacactctttttctagaatctgcaagtggacgtttggagggctttgtggtttgtggtggaaaaggaaatatcttcacctaaatactagatagaagcattctcagacgcttctctgtgatgactgcattcaactcacggagttgaacactccttttgagagcgcagttttgaaactctctttctgtggcatctgcaaggggacatgtagacctctttgaagatttcgttggaaacggaatcatcttcacataaaaactatacagaagcagtctcagaatcttctttgtgatgtttgcattcaaatcccagagttgaactttcctttcaaagttcacgtttgaaacactctttttgcaggatctacaagtggatatttggaccactctgtgtccttcgttcgaaacgggtatatcttcacacgacatctagacagaagctttctcagaaaatcctttgggatgattgagtggaactcacagagctgaacattccttgcgatgtagcagtttagaaacacactttctgcagaatctgcaagtgcatatttggacctctctgaggaattcgttggaaacgggataatttcagctgactaaacagaagcattctcagaaccttcttcgtgatgtctgcattcaactcacagtgtggaacctttctttgatagttcaggtttgaaacactctttttgtagaaactgcaaggggataattgcacttctttgaggcctaccgtagtaaaggaaataacttcctatagaaagaagacagaagcattctcagaaccctcttcgtgatgtttgcattcaactcacagtgctgaacctttctttgatagttcagctttgaaacactcttcttgtagaaactgcaagtggatatttggtcctctctgaggatttcgttggaaacgggataaaccgcacagaactaaacagaagaattctcagagccctcttcgtgatgtttgcattcaactcacagtgctgaacctttctttgatagtgcagctttgaaacactctttttgtagaaactgcaagtggatgtttggtcctctctgaggatttcgttggaaacgggataaaccgcacagaactaaaacagaagcattgtcagaaacttctttgtgatgattgcattcaactcacagagttgaaggttccttttcaaacagcagtttccaatcactctttctgtggaatctgcaagtggatatttgggcctctctgaggatttcgttggaaacgggataaaacgcacagaactaaaacagaagcattctcagaaacttctctgtgatgtttgtgttcaactcccagagtttcacgttgcttttcatagagtagttctgaaacatgcttttcgtagtgtctgcaagtggacatttggagcgctttcaggcctgtggtggaaaacgaattatggtcacataaaaactggagagaagccttctcagaaacttctctgtgatgattgcattcaactcacagagttgaaccctcctatggatagagcagtgttgaaactctctttttgtggaatctgcaagtggatatgtggacctctccgaagatgtctttggaaacgggaatatcttcacataaaaactaaacagaagcattctcaggaaacttcttggtgatgtttgcattcaaatcccagagttgaaccttcctttgatagttcaggtttgaaacactctttttgtaggatctgcaagtggctatttggaccactctgtggccttcgttcgaaacgggtatatcttcgcataaaatctagacagaagcattctcagaaaatactttgtgatgattgagtttaaatcacagagctgaccattcctttggatggagcaggtttgagacacactttttgtagaatctacaagtggatatttggacctctctgaggatttcgttggaaacgggataactgcacctaactaaacggaaagcattctcagaaactgctttgtgatgattgcattcacctcacagagttgaacattcctattgatagagcagtttggaaacactcttgttgtggaatgtgcaagtggagatttggagcgctttgaggcctatggtagtaaagggaatagcttcatagaaaaactagacagtgcattctcaggaactttttggtgatgtttgtattcaactcccagagttgaactttcctttggaaagagcagctatgaaacactctttttctagaatctgcaagtggacgtttggagggctttgtggtttgtggtggaaaaggaaatatcttcacctaaatactagatagaagcattctcagaagcttctctgtgatgagtgcattcaactcacggagttgaacactccttttgagagcgcagttttgaaactctctttctgtggcatctgcaaggggacatgtagacctctctgaagatttcgttggaaacggaatcatcttcacataaaaactatacagaaacagtctcagaatcttctttgtgatgtttgcattcaaatcccagagttgaactttcctttcaaagttcacgtttgaaacactctttttgcaggatctacaagtggatatttggaccactctgtgtccttcgttcaaaacgggtatatcttcacatgacatctagacagaagctttctcagaaaattctttgggatgattgagttgaactcacagagctgaacattccttgcgatgtagcagtttagaaacacactttctgcagaatctgcaagtgcatatttggacctctctgaggaattcgttggaaacgggataatttcagctgactaaaccgaagcattctcagaaccttcttcgtgatgtctgcattcaactcacagtgtggaacctttctttgatagttcaggtttgaaacactctttttgtagaaactgcaaggggataattgcacttctttgaggcctaccgtagtaaaggaaataacttcctatagaaagaagacagaagcattctcagaaccctcttcgtgatgtttgcattcaactcacagtgctgaacctttctttgatagttcagctttgaaacactcttcttgtagaaactgcaagtggatatttggtcctctctgaggatttcgttggaaacgggataaaccgcacagaactaaacagaagaattctcagagccctcttcgtgatgtttgcattcaactcacagtgctgaacctttctttgatagtgcagctttgaaacactatttttgtagaaactgcaagtggatgtttggtcctctctgaggatttcgttggaaacgggataaaccgcacagaactaaaacagaagcattgtcagaaacttctttgtgatgattgcattcaactcacagagttgaaggttccttttcaaacagcagtttccaatcactctttctgtggaatctgcaagtggatatttgggcctctctgaggatttcgttggaaacgggataaaacgcacagaactaaaacagaagcattctcagaaacttctctgtgatgtttgtgttcaactcccagagtttcacgttgcttttcatagagtagttctgaaacatgcttttcgtagtgtctgcaagtggacatttggagcgctttcaggcctgtggtggaaaacgaattatggtcacataaaaactggagagaagccttctcagaaacttctctgtgatgattgcattcaactcacagagttgaaccctcctatggatagagcagtgttgaaactctctttttgtggaatctgcaagtggatatgtggacctctccgaagatgtctttggaaacgggaatatcttcacataaaaactaaacagaagcattctcagaaacttcttggtgatgtttgcattcaaatcccagagttgaaccttcctttgatagttcaggtttgaaacactctttttgtaggatttgcaagtggatatttggaccactctgtggccttcgttcgaaacgggtatatcttcgcataaaatctagacagaagcattctcagaaaatactttgtgatgattgagtttaactcacagagctgaacattcctttggatggagcaggtttgagacacactttttgtagaatctacaagtggatatttggacctctctgaggatttcgttggaaacgcgataactgcacctaactaaacggaagcattctcagaaactgctttgtgatgattgcattcacctcacagagttgaacattcctattgatagagcagtttggaaacactcttgttgtggaatgtgcaagtggagatttggagcgctttgaggcctatggtagtaaagggaatagcttcatagaaaaactagacagatgcattctcaggaactttttggtgatgtttgtattcaactcccagagttgaactttcctttggaaagagcagctatgaaacactctttttctagaatctgcaagtggacgtttggagggctttgtggtttgtggtggaaaaggaaatatcttcacctaaatactagacagaagcattctcagaagcttctctgtgatgactgcattcaactcacggagttgaacactccttttgagagcgtagttttgaaactctctttctgtggcatctgcaaggggacatgtagacctctttgaagatttcgttggaaacggaatcatcttcacataaaaactatacagaagcagtctcagaatcttctttgtgatgtttgcattcaaatcccagagttgaactttcctttcaaagttcacgtttgaaacactctttttgcaggatctacaagtggatatttggaccactctgtgtccttcgttcgaaacgggtatatcttcacacgacatctagacagaagctttctcagaaaattctttgggatgattgagtggaactcacagagctgaacattccttgcgatgtagcagtttagaaacacactttctgcagaatctgcaagtgcatatttggacctctctgaggaattcgttggaaacgggataatttcagctgactaaacagaagcattctcagaaccttcttcgtgatgtctgcattcaactcacagtgtggaacctttctttgatagttcaggtttgaaacactctttttgtagaaactgcaaggggataattgcacttctttgaggcctaccgtagtaaaggaaataacttcctatagaaagaagacagaagcattctcagaaccctcttcgtgatgtttgcattcaactcacagtgctgaacctttctttgatagttcagctttgaaacactcttcttgtagaaactgcaagtggatatttggtcctctctgaggatttcgttggaaacgggataaaccgcacagaactaaacagaagaattctcagagccctcttcgtgatgtttgcattcaactcacagtgctgaacctttctttgatagtgcagctttgaaacactctttttgtagaaactgcaagtggatatttggtcctctctgaggatttcgttggaaacgggataaaccgcacagaactaaaacagaagcattcacagaaaactcttggtgacgactgagtttaactcacagagctgaacattcctttggatggagcagtttcgaaacacactatttgtagaatctgcaagtggatatttgggcctctctgaggatttcgttggaaacgggataaaacgcatagaactaaaacagaagcattctcagaaactactttgtgattattgcattcaagtcacagagttgaacattccctttgacagagcagtttggaaactctctttgtgtagaatctgcaagtggagatatggaccgctttgaggcctatggtagtaaaggaaatagcttcatataaaacctagacagtagcattctcagaaacttctttgtgatgcttgcattcaactcacagagttgaactttcctttcgagagagaagctttgaaacactctttttccagaatgtgcaagtggacatttggggagctttgaggcctgtggaggaaaaggaattatcttcccgtaaaagctagatagaagcattgtcagaaacttctttgtgatgattgcattcaactcacagagttgaaggttccttttcaaacagcagtttccaatcactctttctgtggaatctgcaagtggatatttcgacctctttgaagatttcgttggaaacgggagaatcttcacagaaaagctaaacagaagcattctcagaaacttctctgtgatgtttgtgttcaactcccagagtttcacgttgcttttcatagagtagttctgaaacatgcttttcgtagtgtctgcaagtggacatttggagcactttcaggcctgtggtggaaaacgaattatggtcacaaaaaaactggagagaagccttctcagaaacttctctgtgatgattgcattcaactcacagagttgaaccctcctatggatagagcagtgttgaaactctctttttgtggaatctgcaagtggatatgtggacctctccgaagatgtctttggaaacgggaatatcttcacataaaaactaaacagaagcattctcagaaacttcttggtgatgtttgcattcaaatcccagagttgaaccttcctttgatagttcaggtttgaaacactctttttgtaggatctgcaagtggctatttggaccactctgtggccttcgttcgaaacgggtatatcttcgcataaaatctagacagaagcattctcagaaaatactttgtgatgattgagtttaactcacagagctgaacattcctttggatggagcaggtttgagacacactttttgtagaatctacaagtggatatttggacctctctgaggatttcgttggaaacgggataactgcacctaactaaacggaagcattctcagaaactgctttgtgatgattgcattcacctcacagagttgaacattcctattgatagagcagtttggaaacactcttgttgtggaatgtgcaagtggagatttggagtgctttgaggcctatggtagtaaagggaatagcttcatagaaaaactagacagatgcattctcaggaactttttggtgatgtttgtattcaactcccagagttgaactttcctttggaaagagcagctatgaaacactctttttctagaatctgcaagtggacgtttggagggctttgtggtttgtggtggaaaaggaaatatcttcacctaaatactagatagaagcattctcagaagcttctctgtgatgactgcattcaactcacggagttgaacactccttttgagagggcagttttgaaactctgtttctgtggcatctgcatggggacatgtagacctctttgaagatttcgttggaaacggaatcatcttcacataaaaactatacagaagcagtctcagaatcttctttgtgatgtttgcattcaaatcccagagttgaactttcctttcaaagttcacgtttgaaacactctttttgcaggatctacaagtggatatttggaccactctgtgtccttcgttcgaaacgggtatatcttcacatgacatctagacagaagctttctcagaaaattctttgggatgattgagtggaactcacagagctgaacattccttgcgatgtagcagtttagaaacacaccttctgcagaatctgcaagtgcatatttggacctctctgaggaattcgttggaaacgggataatttcagctgactaaacagaagcattctcagaaccttcttcgtgatgtctgcattcaactcacagtgtggaacctttctttgatagttcaggtttgaaacactctttttgtagaaactgcaaggggataattgcacttctttgaggcctaccgtagtaaaggaaataacttcctatagaaagaagacagaagaattctcagagccctcttcgtgatgtttgcattcaactcacagtgctgaacctttctttgatagtgcagctttgaaacactctttttgtagaaactgcaagtggatatttggtcctctctgaggatttcgttggaaacgggataaaccgcacagaactaaaacagaagcattctcagaaccttcttcgtgatgtttgcattcaactcacagtgttgaacctttctttgatagttcaggtttgaaacggtctttctgtagaaactgcaagtagatatttggacctctctgaggatttcgttggaaacgggataacccgcacagaactaaaacagaagcattcacagaaaactcttggtgacgactgagtttaactcacagagctgaacattcctttggatggagcagtttcgaaacacactatttgtagaatgtgcaagtggatatttaggcctctctgaggatttcgttggaaacgggataaaccgcacagaactaaacagaagcattctcagaaactactttgtgatgattgcattcaagtcacagagttgaacattccctttgacagagcagtttggaaactctctttgtgtagaatctgcaagtggagatatggaccgctttgaggcctatggtagtaaaggaaatagcttcatataaaagctagacagtagcattctcagaaacttctttgtgatgtttgcattcaactcacagagttgaactttccttttgagagagaagctttgaaacactctttttctagaatctgcaagtggacatttggagggctttgaggcctgtgttggaaaagggaatatcttcccgtaaaaactagatagaagcattgtcagaaacttctttgtgatgattgcattcaactcacagagaatgaaggttcctttacaaacagcagtttccaaacactctttctgtggaatctgcaagtggatatttggacctctttgaagatttcgttggaaacgggagaatcttcacagaaaagctaaacagaagcattctcagaaacttctctgtgatgtttgtgtgcaactcccagagtttcacattgcttctcatagagtagttctgaaacatgcttttcatagtgtctgcaagtggacatttggagcgctttcaggcctgtggtggaaaacgaattatggtcacataaaaactggagagaagccttctcagaaacttctctgtgatgattgcattcaactcacagagttgaaccctcctatggatagagcagtgttgaaactctctttttgtggaatctgcaattggatatgtggacccctccgaagatgtctttggaaacgggaatatcttcacataaaaactaaacagaagcattctcagaaacttcttggtgatgtttgcattcaaatcccagagttgaaccttcctttgagagttcaggtttgaaacactctttttgtaggatctgcaagtggatatttggaccactctgtggccttcgttcgaaacgggtacatcttcgcataaaatctagacagaagcattctcagaaaatactttgtgatgattgagtttaaatcacagagctgaccattcctttggatggagcaggtttgagacacactttttgtagaatctacaagtggatatttggacctctctgaggatttcgttggaaacgggataactgcacctaactaaacggaagcattctcagaaactgctttgtgatgattgcattcacctcacagagttgaacattcctattgatagagcagtttggaaacactcttgttgtggaatgtgcaagtggagatttggagcgctttgaggtctatggtagtaaagggaatagcttcatagaaaaactagacagatgcattctcaggaactttttggtgatgtttgtattcaactcccagagttgaactttcctttggaaagagcagctatgaaacactctttttctagaatctgcaagtggacgtttggagggctttgtggtttgtggtggaaaaggaaatatcttcacctaaatactagatagaagcattctcagaagcttctctgtgatgactgcattcaactcacggagttgaacactccttttgagagcgcagttttgaaactctctttctgtggcatctgcaaggggacatgtagacctctttgaagatttcgttggaaacggaatcatcttcacataaaaactatacagaagcagtctcagaatcttctttgtgatgtttgcattcaaatcccagagttgaacttccctttcaaagttcacgtttgaaacactctttttgcaggatctacaagtggatatttggaccactctgtgtccttcgttcgaaacgggtatatcttcacatgacatctagacagaagctttctcagaaaattctttgggatgattgagtggaactcacagagctgaacattccttgcgatgtagcagtttagaaacacactttctgcagaatctgcaagtgcatatttggacctctctgaggaattcgttggaaacgggataatttcagctgactaaacagaagcattctcagaaccttcttcgtgatgtctgcattcaactcacagtgtggaacctttctttgatagttcaggtttgaaacactctttttgtagaaactgcaaggggataattgcacttctttgaggcctaccgtagtaaaggaaataacttcctatagaaagaagacagaagcattctcagagccctcttcgtgatgtttgcattcaactcacagtgctgaacctttctttgatagtgcagctttgaaacactctttttgtagaaactgcaagtggatgtttggtcctctctgaggatttcgttggaaacgggataaaccgcacagaactaaaacagaagcattctcagaaccttcttcgtgatgtttgcattcaactcacagtgttgaacctttctttgatagttcaggtttgaaacggtctttctgtagaaactgcaagtagatatttggacctctctgaggatttcgttggaaacgggataaaccgcacagaactaaaacagaagcattcacagaaaactcttggtgacgactgagtttaactcacagagctgaacattcctttggatggagcagtttcgaaacacactatttgtagaatgtgcaagtggatatttggacctctctgaggatttcgttggaaacgggataaaccgcacagaactaaacagaagcattctcagaaactactttgtgatgattgcattcaagtcacagagttgaacattccctttgacagagcagtttggaaactctctttgtgtagaatctgcaagtggagatatggaccgctttgaggcctatggtagtaaaggaaatagcttcatataaaagctagacagtagcattctcagaaacttctttgtgatgcttgcattcaactcacagagttgaactttcctttcgagagagaagctttgaaacactctttttccagaatctgcaagtggacatttggagggctttgaggcctgtggtggaaaaggaattatcttcccgtaaaagctagatagaagcattgtcagaaacttctttgtgatgattgcattcaactcacagagttgaaggttccttttcaaacagcagtttccaatcactctttctgtggaatctgcaagtggatatttgggcctctctgaggatttcgttggaaacgggataaaacgcacagaactaaaacagaagcattctcagaaacttctctgtgatgtttgtgttcaactcccagagtttcacgttgcttttcatagagtagttctgaaacatgcttttcgtagtgtctgcaagtggacatttggagcgctttcaggcctgtggtggaaaacgaattatggtcacataaaaactggagagaagccttctcagaaacttctctgtgatgattgcattcaactcacagagttgaaccctcctatggatagagcagtgttgaaactctctttttgtggaatctgcaagtggatatgtggacctctccgaagatgtctttggaaacgggaatatcttcacataaaaactaaacagacattctcagaaacttcttggtgatgtttgcattcaaatcccagagttgaaccttcctttgatagttcaggtttgaaacactctttctgtaggatctgcaagtggctatttggaccactctgtggccttcgttcgaaacgggtatatcttcgcataaaatctagacagaagcattctcagaaaatactttgtgatgattgagttgaactcacagagctgaacattcctttggatggagcaggtttgagacacactttttgtagaatctacaagtggatatttggacctctctgaggatttcgttggaaacgggataactgcacctaactaaacggaagcattctcagaaactgctttgtgatgattgcattcacctcacagagttgaacattcctattgatagagcagtttggaaacactcttgttgtggaatgtgcaagtggagatttggagcgctttgaggcctatggtagtaaagggaatagcttcatagaaaaactagacagatgcattctcaggaacattttggtgatgtttgtattcaactcccagagttgaactttcctttggaaagagcagctatgaaacactctttttctagaatctgcaagtggacgtttggagggctttgtggtttgtggtggaaaaggaaatatcttcacctaaatactacatagaagcattctcagaagcttctctgtgatgactgcattcaactcacggagttgaacactccttttgagagcgcagttttgaaactctctttctgtggcatctgcaaggggacatgtagacctctttgaagatttcgttggaaacggaatcatcttcacataaaaactatacagaagcagtctcagaatcttctttgtgatgtttgcattcaaataccagagttgaactttcctttcaaagttcacgtttgaaacactctttttgcaggatctacaagtggatatttggaccactctgtgtccttcgttcgaaacgggtatatcttcacacgacatctagacagaagctttctcagaaaattctttgggatgattgagtggaactcacagagctgaacattccttgcgatgtagcagtttagaaacacactttctgcagaatctgcaagtgcatatttggacctctctgaggaattcgttggaaacgggataatttcagctgactaaacagaagcattctcagaaccttcttcgtgatgtctgcattcaactcacagtgtggaacctttctttgatagttcaggtttgaaacactctttttgtagaaactgcaaggggataattgcactctttgaggagtaccgtagtaaaggaaataacttcctataaaaagaagacagaagcattctcagaaccctcttcgtgatgtttgcattcaactcacagtgctgaacctttctttgatagttcagctttgaaacactctttttgtagaaactgcaaatggatatttggtcctctctgaggatttcgttggaaaagggataaaacgcacagaactaaacagaagcattcacagaaaactcttggtgacgactgagtttaactcacagagctgaacattcctttggatggagcagtttcaaaacacactatttgtagaatctgcaagtggatatgtgggcctctctgaggatttcgttggaaacgggataaaccgcacagaactaaaacagaagcattctcagaaactactttgtgatgattgcattcaagtcacagagttgaacattccctttgacagagcagtttggaaactctctttgtgtagaatctgcaagtggagatatggaccgctttgaggcctatggtagtaaaggaaatagcttcatataaaagctagacagtagcattctcagaaacttctttgtgatgcttgtattcaactcacagagttgaactttcctttcgagagagaagctttgaaacactctttttccagaatctgcaagtggacatttggagggctttgaggcctgtggtggaaaatgaattatcttcccgtataagctagatagaagcattgtcagaaacttctttgtgatgattgcattcaactcacagagttgaaggttccttttcaaagagcagtttccaatcactctttgtgtggaatctgcaagtggatatttggacctattttgaagatttcgttggaaacgggagaatcttcacaggaaagctaaacagaagcattctcagaaacttctctgtgatgtttgtgttcaactcccagagtttcacattgcttttcatagagtagttctgaaacatggttttcgtagtgtctacaagtggacatttggagcgcttccagtcctgtggtggaaaacgaattatggtcacataaaaactggagagaagccttctcagaaacttctctgtgatgattgcattcaactcacagagttgaaccctcctatggatagagcagtgttgaaactctctttttgtggaatctgcaagtggatatgtggacctctccgaagatgtctttggaaacgggaatatcttcacataataactaaacagaagcattctcagaaacttcttggtgatgtttgcattgaaatcccagagttgaaccttcctttgacagttcaggtttgaaacactctttttgtaggatctgcaagtggatatttggaccactctgtggccttcgttcgaaacgggtacatcttcgcataaaatctagacagaagcattctcagaaaatactttgtgatgattgagttgaactcacagagctgaacattcctttggatggagcaggtttgagacacactttttgtagaatctacaagtggatatttggacctctctgaggatttcgttggaaacgggataactgcacctaactaaacggaagcattctcagaaactgctttgtgatgattgcattcacctcacagagttgaacattcctattgatagagcagtttggacacactcttgttgtggaatgtgcaagtggagatttggagcgctttgaggcctatggtagtaaagggaacagcttcatagaaaaactagacagatgcattctcaggaactttttggtgatgtttgtattcaactcccagagttgaactttcctttggaaagagcagctatgaaacactgtttttctagaatctgcaagtggacgtttggagggctttgtggtttgtggtggaaaaggaaatatcttcacctaaatactagatagaagcattctcagaagcttctctgtgatgactgcattcaactcacggagttgaacactccttttgagagcgcagttttgaaactctctttctgtggcatctgcaaggggacatgtagacctctttgaagatttcgttggaaacggaatcatcttcacataaaaactatacagaagcagtctcagaatcttctttgtgatgtttgcattcaaatcccagagttgaactttcctttcaaagttcacgtttgaaacactctttttgcaggatctacaagtggatatttggaccactctgtgtccttcgttcgaaacgggtataacttcacacgacatctagacagaagctttctcagaaaattctttgggatgattgagtggaactcacagagctgaacattccttgcgatggagcagtttagaaacacactttctgcagaatctgcaagtgcatatttggacctctctgaggaattcgttggaaacgggataatttcagctgactaaacagaagcattctcagaaccttcttcgtgatgtctgcattcaactcacagtgtggaacctttctttgatagttcaggtttgaaacactctttttgtagaaactgcaaggggataattgcacttctttgaggcctaccgtagtaaaggaaataacttcctatagaaagaagacagaagaattctcagagccctcttcgtgatgtttgcattcaactcacagtgctgaacctttctttgatagtgcagctttgaaacactctttttgtagaaactgcaagtggatgtttggtcctctctgaggatttcgttggaaacgggataaaccgcacagaactaaaacagaagcattctcagaaccttcttcgtgatgtttgcattcaactcacagtgttgaacctttctttgatagttcaggtttgaaacggtctttctgtagaaactgcaagtagatatttggacctctctgaggatttcgttggaaacgggataaaccgcacagaactacaacagaagcattcacagaaaactcttggtgacgactgagtttaactcacagagctgaacattcctttggatggagcagtttcgaaacacactatttgtagaatgtgcaagtggatatttgggcctctctgaggatttcgttggaaacgggataaaccgcacagaactaaacagaagcattctcagaaactactttgtgatgattgcattcaagtcacagagttgaacattccctttgacagagcagtttggaaactctctttgtgtagaatctgcaagtggagatatggaccgctttgaggcctatggtagtaaaggaaatagcttcatataaaagctagacagtagcattctcagaaacttctttgtgatgcttgcattcaactcacagagttgaactttcctttcgagagagaagctttgaaacactctttttccagaatgtgcaagtggacatttggggagctttgaggcctgtggagggaaaggaattatcttcccgtaaaagctagatagaagcattgtcagaaacttctttgtgatgattgcattcaactcacagagttgaaggttccttttcaaacagcagtttccaatcactctttctgtggaatctgcaagtggatatttgggcctctctgaggatttcgttggaaacgggataaaacgcacagaactaaaacagaagcattctcagaaacttctctgtgatgtttgtgttcaactcccagagtttcacgttgcttttcatagagtagttctgaaacatgcttttcgtagtgtctgcaagtggacatttggagcgctttcaggcctgtggtggaaaacgaattatggtcacataaaaactggagagaagccttctcagaaacttctctgtgatgattgcattcaactcacagagttgaaccctcctatggatagagcagtgttgaaactctctttttgtggaatctgcaagtggatatgtggacctctccgaagatgtctttggaaacgggaatatcttcacataaaaactaaacagaagcattctcagaaatttcttggtgatgtttgcattcaaatcccagagttgaaccttcctttgatagttcaggtttgaaacactctttctgtaggatctgcaagtggctatttggaccactctgtggccttcgttcgaaacgggtatatcttcgcataaaatctagacagaagcattctcagaaaatactttgtgatgattgagtttaaatcacagagctgaacattcctttggatggagcaggtttgagacacactttttgtagaatctacaagtggatatttggacctctctgaggatttcgttggaaacgggataactgcacctaactaaacggaagcattctcagaaactgctttgtgatgattgcattcacctcacagagttgaacattcctattgatagagcagtttggaaacactcttgttgtggaatgtgcaagtggagatttggagcgctttgaggcctgtggtagcaaagggaatagcttcatagaaaaactagacagatgcattctcaggaactttttggtgatgtttgtattcaactcccagagttgaactttcctttgtaaagagcagctatgaaacacactttttctagaatctgcaagtggacgtttggagggctttgtggtttgtggtggaaaaggaaatatcttcacctaaatactagacagaagcattctcagaagcttctctgtgatgactgcattcaactcacggagttgaacactccttttgagagcgcagttttgaaactctctttctgtggcatctgcaaggggacatgtagacctctttgaagatttcgttggaaacggaatcatcttcacataaaaactatacagaagcagtctcagaatcttctttgtgatgtttgcattcaaatcccagagttgaactttcctttcaaagttcacgtttgaaacactctttttgcaggatctacaagtggatatttggaccactctgtgtccttcgttcgaaacgggtatatcttcacatgacatctagacagaagctttctcagaaaattctttgggatgattgagtggaactcacagagctgaacattccttgcgatgtagcagtttagaaacacactttctgcagaatctgcaagtgcatatttggacctctctgaggaattcgttggaaacgggataatttcagctgactaaacagaagcattctcagaaccttcttcgtgatgtttgcattcaactcacagtgctgaaactttctttgatagttcagctttgaaacactctttttgtagaaactgcaagtggatatttggtcctctctgaggttttcgttggaaacgggataaaccgcacagaacgaaacagaagcattctcagaaacttcttcgtgatgtttgcattcaaatcacagtgctgaacctttctttgatagttcagctttgaaacactctttttgtagaaactgcaagtggatatttggacctctctgaggatttctttggaaacgggatagaccgcacagaactaaaacagaagcattctcagaaccctcttcgtgatgtttgcattcaactcacagtgttgaacctttctttgatagttcaggttggaaacggtctttctgtagaaactgcaagtagatatttggacctctctgaggatttcgttggaaaagggataaaccgcacagaactaaacagaagcattcacagaaaactcttggtgacgactgagtttaactcacagagctgaacattcccttggatggagcagtttcgaaacacactctttgtagaatctgcaggtggatatttgggcctctctgaggatttcgttggaaacgggataaactgcacagaactaaaacagaagcattctcagaaactactttgtgatgattgcattcaagtcacagagttgaacattccctttgacagagcagtttggaaactctctttgtgtagaatctgcaagtggagatatggaccgctttgagacctatggtagtaaaggaaatagcttcatataaaagctagtcagtagcattctcagaaacttctttgtgatgcttgcattcaactcacagagttgaactttcctttcgagagagaagctttgaaacactctttttccagaatctgcaagtggacatttggagggctttgaggcctgtggtggaaaaggaattatcttcccgtaaaagctagatagaagcattgtcagaaacttctttgagatgattgcattcaactcacagagttgaaggttccttttcaaacagcagtttccaatcactctttctgtggaatctgcaagtggatatttcgacctctttgaagatttcgttggaaacgggagaatcttcacagaaaagctaaacagaagcattctcagaaacttctctgtgatgtttgtgttcaactcccagagtttcacgttgcttttcatagagtagttctgaaacatgcttttcgtagtgtctgcaagtggacatttggagcgctttcaggcctgtggtggaaaacgaattatggtcacataaaaactggagagaagccttctcagaaacttctctgtgatgactgcattcaactcacagagttgaaccctcctatggatagagcagtgttgaaactctctttttgtggaatctgcaagtggatatgtggacctctccgaagatgtctttggaaacgggaatatcttcacataaaaactaaacagaagcattctcagaaacttcttggtgatgtttgcattcaaatcccagagttgaaccttcctttgatagttcaggtttgaaacactctttttgtaggatctgcaagtggatatttggaccactctgtggccttcgttcgaaacgggtatatcttcgcataaaatctagacagaagcattctcagaaaatactttgtgatgattgagtttaactcacagagctgaacattcctttggatggagcaggcttgagacacactttttgtagaatccacaagtggatatttggacctctctgaggatttcgttggaaacgggataactgcaccgaactaaacggaagcattctcagaaactgctttgtgatgattgcattcacctcacagagttgaacattcctattgatagagcagtttggaaacactcttgttgtggaatgtgcaagtggagatttggagcgctttgaggcctatggtagtaaagggaatagcttcatagaaaaactagacagatgcattctcaggaactttttggtgatgtttgtattcaactcccagagttgaactttcctttggaaagagcagctatgaaacactgtttttctagaatctgcaagtggacgtttggagggctttgtggtttgtggtggaaaaggaaatatcttcacctaaatactagatagaagcattctcagaagcttctctgtgatgactgcattcaactcacggagttgaacactccttttgagagcgcagttttgaaactctctttctgtggcatctgcaaggggacatgtagacctctttgaagatttcgttggaaacggaatcatcttcacataaaaactatacagaagcagtctcagaatcttcgttgtgatgtttgcattcaaatcccagagttgaactttcctttcaaagttcacgtttgaaacactctttttgcaggatctacaagtggatatttggaccactctgtgtccttcgtacgaaacgggtatatcttcacatgacatctagacagaagctttctcagaaaattctttgggatgattgagttgagcaaacagagctgaacactccttgcgatgtagcagtttagaaacacactttctgcagaatctgcaagtgcaaatgtggacctctctgaggaattctttggaaacgggataatttcacctgactaaacagaagcattctcagaaccttcttcgtgatgtctgcattcaactcacagtgtggaacctttctttgatagttcagttttgaaacactctttttgtagaaactgcaaggggataattgcacttctttgaggcctaccgtagtaaaggaaataacttcctatgaaaagaagacagaagcattctcagaaccctcttcgtgatgtttgcattcaactcacagtgctgaacctttctttgatagttcagctttgaaacactctttttgtagaaactgcaagtggatatttggtcctctctgaggatttcgttggaaacgggataaaccgcacagaactaaacagaagcattctcagaaccttcttcgtgatgtttgcattcaactcacagtgttgaacctttctttgatagttcaggtttgaaacggtctttctgtagaaactgcaagtagatatttggacctctctgaggatttcgttggaaacgggataaactgcacagaactaaaacagaagcattcacagaaaactcttggtgacgactgagtttaactcacagagctgaacattcctttggatggagcagtttcgaaacacactatttgtggaatgtgcaagtggatatttgggcctctctgaggatttcgttggaaacgggataaaccgcacagaactaaacagaagcattctcagaaactactttgtgatgattgcattcaagtcacagagttgaacattccctttgacagagcagtttggaaactctctttgtgtagaatctgcaagtggagatatggaccgctttgaggcctatggtagtaaaggaaatagcttcatataaaagctagacagtagcattctcagaaacttctttgtgatgcttgcattcaactcacagagttgaactttcctttcgagagagaagctttgaaacactctttttccagaatctgcaagtggacatttggagggctttgaggcctgtggtggaaaaggaattatcttcccgtaaaagctagatagaagcattgtcagaaacttctttgtgatgactgcattcaactcacagagttgaaggttccttttcaaacagcagtttccaatcactctttctgtggaatctgcaagtggatatttcgacctctttgaagatttcgttggaaacgggagaatcttcacagaaaagctaaacagaagcattctcagaaacttctctgtgatgtttgtgttcaactcccagagtttcacgttgcttttcatagagtagttctgaaacatgcttttcgtagtgtctgcaagtggacatttggagcgctttcaggcctgtggtggaaaacgaattatggtcacataaaaactggagagaagccttctcagaaacttctctgtgatgattgcattcaactcacagagttgaaccctcctatggatagagcagtgttgaaactctctttttgtggaatctgcaagtggatatgtggacctctccgaagatgtctttggaaacgggaatatcttcacataaaaactaaacagaagcattctcagaaacttcttggtgatgtttgcattcaaatcccagagttgaaccttcctttgatagttcaggtttgaaacactctttctgtaggatctgcaagtggctatttggaccactctgtggccttcgtttgaaacgggtatatcttcgcataaaatctagacagaagcattctcagaaaatactttgtgatgattgagtttaaatcacagagctgaccattcctttggatggagcaggtttgagacacactttttgtagaatctacaagtggatatttggacctctctgaggatttcgttggaaacgggataactgcacctaactaaacggaagcattctcagaaactgctttgtgatgattgcattcacctcacagagttgaacattcctattgatagagcagtttggaaacactcttgttgtggaatgtgcaagtggagatttggagcgctttgaggcctatggtagtaaagggaatagcttcatagaaaaactagacagatgcattctcaggaactttttggtgatgtttgtattcaactcccagagttgaactttcctttggaaagagcagctatgaaacactgtttttctagaatctgcaagtggacgtttggagggctttgtggtttgtggtggaaaaggaaatatcttcacctaaatactagatagaagcattctcagaagcttctctgtgatgactgcattcaactcacggagttgaacactccttttgagagcgcagttttgaaactctctttctgtggcatctgcaaggggacatgtagacctctttgaagatttcgttggaaacggaatcatcttcacataaaaactatacagaagcagtctcagaatcttctttgtgatgtttgcattcaaatcccagagttgaactttcctttcaaagttcacgtttgaaacactttttgcaggatctacaagtggatatttggaccactctgtgtccttcgttcgaaacgggtatatcttcacatgacatctagacagaagctttctcagaaaattgtttgggatgattgatttgaactcacagagctgagcattccttgcgatgtagcagtttagaaacacactttctgcagaatctgcaagtgcatatgtggacctctctgaggaattcgttggaaacgggataatttcagctgactaaacagaagcattctcagaaccttcttcgtgatgtctgcattcaactcacagtgtggaacctttctttgatagttcaggtttgaaacactctttttgtagaaactgcaaggggataattgcactctttgaggagtaccgtagtaaaggaaataacttcctataaaaagaagacagaagcattctcagaaccctcttcgtgatgtttgcattcaactcacagtgctgaacctttctttgatagttcagctttgaaacactctttttgtagaaactgcaaatggatatttggtcctctctgaggatttcgttggaaaagggataaaacgcacagaactaaacagaagcattctcagaaccttcttcgtgatgtttgcattcaactcacagtgttgaacctttctttgatagttcaggtttgaaacggtctttctgtagaaactgcaagtagatatttggacctctctgaggatttcgttggaaacgggataacccgcacagaactaaaacagaagcattcagaaaaaactcttggtgacgactgagtttaactcacagagctgaacattcctttggatggagcagtttcgaaacacactatttgtagaatgtgcaagtggatatttgggcctctctgaggatttcgttggaaacgggataaaccgcacagaactaaacagaagcattctcagaaactactttgtgatgattgcattcaagtcacagagttgaacattccctttgacagagcagtttggaaactctctttgcgtagaatctgcaagtggagatatggaccgctttgaggcctatggtagtaaaggaaatagcttcatataaaagctagacagcagcattctcagaaacttctttgtgatgcttgcattcaactcacagagttgaactttcctttcgagagagaagctttgaaacactctttttccagaatctgcaagtggacatttggagggctttgaggcctgtggtggaaaaggaattatcttcccgtaaaagctagatagaagcattgtcagaaacttctttgtgatgattgcattcaactcacagagttgaaggttccttttcaaacagcagtttccaatcactctttctgtggaatctgcaagtggatatttgggcctctctgaggatttcgttggaaacgggataaaacgcacagaactaaaacagaagcattctcagaaacttctctgtgatgtttgtgttcaactcccagagtttcacgttgcttttcatagagtagttctgaaacatgcttttcgtagtgtctgcaagtggacatttggagcgctttcaggcctgtggtggaaaacgaattatggtcacataaaaactggagagaagccttctcagaaacttctctgtgatgattgcattcaactcacagagttgaaccctcctatggatagagcagtgttgaaactctctttttgtggaatctgcaagcggatatgtggacctctccgaagatgtctttggaaacgggaatatcttcacataaaaactaaacagaagcattctcagaaacttcttggtgatgtttgcattcaaatcccagagttgaaccttcctttgatagttcaggtttgaaacactctttctgtaggatctgcaagtggctatttggaccactctgtggccttcgttcgaaacgggtatatcttcgcataaaatctagacagaagcattctcagaaaatactttgtgatgattgagtttaactcacagagctgaacattcctttggatggagcaggtttgagacacactttttgtagaatctacaagtggatatttggacctctctgaggatttcgttggaaacgggataactgcacctaactaaacggaagcattctcagaaactgctttgtgatgattgcattcacctcacagagttgaacattcctattgatagagcagtttggaaacactcttgttgtggaatgtgcaagtggagatttggagcgctttgaggcctatggtagtaaagggaatagcttcatagaaaaactagacagatgcattctcaggaactttttggtgatgtttgtattcaactcccagagttgaactttcctttggaaagagcagctatgaaacactgtttttctagaatctgcaagtggacgtttggagggctttgtggtttgtggtggaaaaggaaatatcttcacctaaatactagatagaagcattctcagaagcttctctgtgatgactgcattcaactcacggagttgaacactccttttgagagcgcagttttgaaactctctttctgtggcatccgcaaggggacatgtagacctctttgaagatttcgttggaaacggaatcatcttcacataaaaactatacagaagcagtctcagaatcttctttgtgatgtttgcattcaaatcccagagttgaacttgcctttcaaagttcacgtttgaaacactctttttgcaggatctacaagtggatatttggaccactctgtgtccttcgttcgaaacgggtatatcttcacatgacatctagacagaagctttctcagaaaatactttgggatgattgagttgagcaaacagagctgaacactccttgcgatgtagcagtttagaaacacactttctgcagaatctgcaagtgcatatgtggacctctctgaggaattcgttggaaaccggataatttcagctgactaaacagaagcattctcagaaccttcttcgtgatgtctgcattcaactcacagtgtggaacctttctttgatagttcaggtttgaaacactctttttgtagaaactgcaaggggatcattgcacttttttgaggcctaccgtagtaaaggagataacttcctataaaaagaagacagaagcattctcagaaccctcttcgtgatgtttgcattcaactcacggtgctgaacttttctttgatagttcagctttgaaacactctttttgtagaaactgcaagtggatatttggtcctctctgaggatttcgtttgaaacgggataaaccgcacagaactaaacagaagcattctcagaaccttcttcgtgatgtttgcattcaactcacagtgttgaacctttctttgatagttcaggtttgaaacggtctttctgtagaaactgcaagtagatattttgacctctctgaggatttcgttggaaacgggataaaccacacagaactaaaacagaagcattcacagaaaactcttggtgacgactgagtttaactcacagagctgaacattcctttggatggagcagtttcgaaacacactatttgtagaatgtgcaagtggatatgtgggcctctctgaggatttcgttggaaacgggataaaccgcacagaactaaacagaagcattctcagaaactactttgtgatgattgcattcaagtcacagagttgaacattccctttgacagagcagtttggaaactctctttgtgtagaatctgcaagtggagatatggaccgctttgaggcctatggtagtaaaggaaatagcttcatataaaagctagacagtagcattctcagaaacttctttgtgatgcttgcattcaactcacagagttgaactttcctttcgagagagaagctttgaaacactctttttccagaatgtgcaagtggacatttggggagctttgaggcctgtggtggaaaaggaattatcttcccgtaaaagctagatagaagcattgtcagaaacttctttgtgatgattgcattcaagtcacagagttgaaggttccttttcaaacagcagtttccaaacactctttctgtggaatctgcaagtggatatttggacctctttgaagatttcgttggaaacgggagaatcttcacagaaaagctaaacagaagcattctcagaaacttctctgtgatgtttgtgttcaactcccagagtttcacattgcttttcatagagtagttctgaaacatgcttttcgtagtgtctacaagtggacatttggagcgctttcaggcctgtggtggaaaacgaattatggtcacataaaaactggagagaagccttctcagaaacttctctgtgatgattgcattcaactcacagagttgaaccctcctatggatagagcagtgttgaaactctctttttgtggaatctgcaagtggatatgtggacctctccgaagatgtctttggaaacgggaatatcttcacataaaaacttaacagaagcattctcagaaacttcttggtgatgtttgcattcaaatcccagagttgaaccttcctttgatagttcaggtttgaaacactctttctgtaggatctgcaagtggctatttggaccactctgtggccttcgttcgaaacgggtatatcttcgcataaaatctagacagaagcattctcagaaaatactttgtgatgattgagtttaaatcacagagctgaccattcctttggatggagcaggtttgagacacactttttgtagaatctacaagtggatatttggacctctctgaggatttcgttggaaacgggataactgcacctaactaaacggaagcattctcagtaaactgctttgtgatgattgcattcacctcacagagttgaacattcctattgatagagcagtttggaaacactcttcttgtggaatgtgcaagtggagatttggagcgctttgaggcctatggtagtaaagggaatagcttcatagaaaaactagacagatgcattctcaggaactttttggtgatgtttgtattcaactcccagagttgaactttcctttggaaagagcagctatgaaacactctttttctagaatctgcaagtggacgtttggagggctttgtggtttgtggtggaaaaggaaatatcttcacctaaatactagatagaagcattctcagaagcttctctgtgatgactgcattcaactcacggagttgaacactccttttgagagcgcagttttgaaactctctttctgtggcatctgcaaggggacatgtagacctctctgaagatttcgttggaaacggaatcatcttcacataaaaactatacagaaacagtctcagaatcttctttgtgatgtttgcattcaaatcccagagttgaactttcctttcaaagttcacgtttgaaacactctttttgcaggatctacaagtggatatttggaccactctgtgtccttcgttcaaaacgggtatatcttcacatgacatctagacagaagctttctcagaaaattctttgggatgattgagtggaactcacagagctgaacattccttgcgatgtagcagtttagaaacacactttctgcagaatctgcaagtgcatatttggacctctctgaggaattcgttggaaacgggataatttcagctgactaaacagaagcattctcagaaccttcttcgtgatgtctgcattcaactcacagtgtggaacctttctttgatagttcaggtttgaaacactctttttgtagaaactgcaaggggataattgcacttctttgaggcctaccgtagtaaaggaaataacttcctatagaaagaagacagaagcattctcagaaccctcttcgtgatgtttgcattcaactcacagtgctgaacctttctttgatagttcagctttgaaacactcttcttgtagaaactgcaagtggatatttggtcctctctgaggatttcgttggaaacgggataaaccgcacagaactaaacagaagaattctcagagccctcttcgtgatgtttgcattcaactcacagtgctgaacctttctttgatagtgcagctttgaaacactctttttgtagaaactgcaagtggatgtttggtcctctctgaggatttcgttggaaacgggataaaccgcacagaactaaaacagaagcattgtcagaaacttctttgtgatgattgcattcaactcacagagttgaaggttccttttcaaacagcagtttccaatcactctttctgtggaatctgcaagtggatatttgggcctctctgaggatttcgttggaaacgggataaaacgcacagaactaaaacagaagcattctcagaaacttctctgtgatgtttgtgttcaactcccagagtttcacattgcttttcatagagtagttctgaaacatgcttttcgtagtgtctacaagtggacatttggagcgctttcaggcctgtggtggaaaacgaattatggtcacataaaaactggagagaagccttctcagaaacttctctgtgatgattgcattcaactcacagagttgaaccctcctatggatagagcagtgttgaaactctctttttgtggaatctgcaagtggatatgtggacctctccgaagatgtctttggaaacgggaatatcttcacataaaaactaaacagaagcattctcagaaacttcttggtgatgtttgctttcaaatcccagagttgaaccttcctttgatagtttaggtttgaaacactctttttgtaggatctgcaagtggatatttggaccacactgtggccttcgttcgaaacgggtacatcttcgcataaaatctagacagaagcattctcagaaaatactttgtgatgattgagttgaactcacagagctgaacattcctttggatggagcaggtttgagacacactttttgtagaatctacaagtggatatttggacctctctgaggatttcgttggaaacgggataactgcacctaactaaacggaagcattctcagaaactgctttgtgatgattgcattcacctcacagagttgaacattcctattgatagagcagtttggaaacactcttgttgtggaatgtgcaagtggagatttggagcgctttgaggcctgtggtagtaaagggaatagcttcatagaaaaactagacagatgcattctcaggaaccttttggtgatgtttgtattcaactcccagagttgaactttcctttggaaagagcagctatgaaacactctttttctagaatctgcaagtggacgtttggagggctttgtggtttgtggtggaaaaggaaatatcttcacctaaatactagatagaagcattctcagaagcttctctgtgatgactgcattcaactcacggagttgagcactccttttgagagcacagttttgaaactctctttctgtggcatctgcaaggggacatgtcgacctctttgaagatttcgttggaaacggaatcatcttcacatcaaaactatacagaagcagtctcagaatcttctttgtgatgtttgcattcaaatcccagagttgaactttcctttcaaagttcacgtttgaaacactctttttgcaggatctacaagtggatatttggaccactctgtgtccttcgttcgaaacgggtatatcttcacatgacatctagacagaagctttctcagaaaattctttgggatgattgagttgaactcacagagctgagcattccttgcgatgtagcagtttagaaacacactttctgcagaatctgcaagtgcatatttggacctctgtgaggaattcgttggaaacgggataatttcagctgactaaacagaagcattctcagaaccttcttcgtgatgtctgcattcaactcacagtgtggaacctttctttgatagttcaggtttgaaacactctttttgtagaaactgcaaggggataattgcacttctttgaggcctaccgtagtaaaggaaataacttcctatagaaagaagacagaagcattctcagaaccctcttcgtgatgtttgcattcaactcacagtgctgaacctttctttgatagttcagctttgaaacactctttttgtagaaactgcaagtggatatttggtcctctctgaggatttcgttggaaacgggataaaccgcacagaactaaacagaagcattctcagaaccttcttcgtgatgtttgcattcaactcacagtgttgaacctttctttgatagttcaggtttgaaacggtctttctgtagaaactgcaagtagatatttggacctctctgaggatttcgttggaaacgggataaaccgcacagaactaaaacagaagcattcacagaaaactcttggtgacgactgagtttaactcacagagctgaacattcctttggatggagcagtttcgaaacacactatttgtagaatgtgcaagtggatatttaggcctctctgaggatttcgttggaaacgggataaaccgcacagaactaaacagaagcattctcagaaactactttgtgatgattgcattcaagtcacagagttgaacattccctttgacagagcagtttggaaactctctttgtgtagaatctgcaagtggagatatggaccgctttgaggcctatggtagtaaaggaaatagcttcatataaaagctagacagtagcattctcagaaacttctttgtgatgcttgcattcaactcacagagttgaactttcctttcgagagagaagctttgaaacactctttttccagaatctgcaagtggacatttggagggctttgaggcctgtggtggaaaaggaattatcttcccgtaaaagctggatagaagcattgtcagaaacttctttgtgatgattgcattcaagtcacagagttgaaggttccttttcaaagagcagtttccaatcactctttctgtggaatctgcaagtggatatttggacctctttgaagatttcgttggaaacgggagaatcttcacagaaaagctaaacagaagcattctcagaaacttctctgtgatgtttgtgttcaactcccagagtttcacgttgcttttcatagagtagttctgaaacatgcttttcgtagtgtctgcaagtggacatttggagcgctttcaggcctgtggtggaaaacgaattatggtcacataaaaactggagagaagccttctcagaaacttctctgtgatgattgcattcaactcacagagttgaaccctcctatggatagagcagtgttgaaactctctttttgtggaatctgcaagtggatatgtggacctctccgaagatgtctttggaaacgggaatatcttcacataaaaactaaacagaagcattctcagaaacttcttggtgatgtttgcattcaaatcccagagttgaaccttcctgtgatagttcaggtttgaaacactctttttgtaggatctgcaagtggctatttggaccactctgtggccttcgttcgaaacgggtatatcttcgcataaaatctagacagaagcattctcagaaaatactttgtgatgattgagtttaactcacagagctgaacattcctttggatggagcaggtttgagacacaccttttgtagaatctacaagtggatatttggacctctctgaggatttcgttggaaacgggataactgcacctaactaaacggaaagcattctcagaaactgctttgtgatgattgcattcacctcacagtagttgaacattcctattgatagagcagtttggaaacactcttgttgtggaatgtgcaagtggagatttggagcgctttgaggcctatggtagtaaagggaatagcttcatagaaaaactagacagatgcattctcaggaactttttggtgatgtttgtattcaactcccagagttgaactttcctttggaaagagcagctatgaaacactctttttctagaatctgcaagtggacgtttggagggctttgtggtttgtggtggaaaaggaaatatcttcacctaaatactagatagaagcattctcagaagcttctctgtgatgactgcattcaactcacggagttcaacactccttttgagagcgcagttttgaaactctctttctgtggcatctgcaaggggacatgtagacctctttgaagatttcgttggaaacggaatcatcttcacataaaaactatacagaagcagtctcagaatcttctttgtgatgtttgcattcaaatcccagagttgaactttcctttcaaagttcacgtttgaaacactctttttgcaggatctacaagtggatatttggaccactctgtgtccttcgttcgaaacgggtatatcttcacatgacatctagacagaagctttctcagaaaattctttgggatgattgagttgaactcacagagctgagcattccttgcgatgtagcagtttagaaacacactttctgcagaatctgcaagtgcatatttggacctctgtgaggaattcgttggaaacgggataatttcagctgactaaacagaagtattctcagaaccttcttcgtgatgtttgcattcaactcacagtgttgaacctttctttgatagttcaggtttgaaacggtctttctgtagaaaatgcaagtagatatttggacctctctgaggatttcgttggaaacgggttaaaccgcacagaactaaaacagaagcattctcagagtcctcttcgtgatgtttgcattcaactcacagtgctgaacctttttttgatagtgcagctttgaaacactctttttgtagaaactgcaagtggatatttggtcctctctgaggatttcgttggaaacgggataaaccgcacagaactaaaacagaagcattctcagaaccttcttcgtgatgtttgcattcaactcacagtgttgaacctttctttgatagttcaggtttgaaacggtctttctgtagaaactgcaagtagatatttggacctctctgaggatttcgttggaaacgggataacccgcacagaactaaaacagaagcattcacagaaaacacttggtgacgactgagtttaactcacagagctgaacatcactttggatggagcagtttcgaaacacactattcgtagaatgtgcaagtggatatttgggcctctctgaggatttcgttggaaacgggataaaccgcacagaactaaaacagaagcattctcagaaactactttgtgatgattgcattcaagtcacagagttgaacattcccgttgacagagcagtttggaaactctctttgtgtagaatctgcaaagtggagatatggaccgctttgaggactatggtagtaaaggaaatagcttcatataaaagctagacagtagcattctcagaaacttctttgtgatgcttgcattcaactcacagagttgaactttcctttcgagagagaagctttgaaacactctttttccagaatctgcaagtggacatttggagggctttgaggcctgtggtggaaaaggaattatcttcccgtaaaagctagatagaagcattgtcagaaacttctttgtgatgattgcattcaactcacagagttgaaggttccttttcaaacagcagtttccaatcactctttctgtggaatctgcaagtggatatttgggcctctctgaggatttcgttggaaacgggataaaacgcacagaactaaaacagaagcattctcagaaacttctctgtgatgtttgtgttcaactcccagagtttcacattgcttctcatagagtagttctgaaacatgcttttcgtagtgtctgcaagtggacatttggagcgctttcaggcctgtggtggaaaacgaattatggtcacatgaaaactggagagaagccttctcagaaacttctctgtgatgattgcattcaactcacagagttgaaccctcctatggatagagcagtgttgaaactctctttttgtggaatctgcaagcggatatatggacctctccgaagatgtctttggaaacgggaatatcttcacataaaaactaaacagaagcattctcagaaacttcttggtgatgtttgcattcaaatcccagagttgaaccttcctttgatagttcaggtttgaaacactctttctgtaggatctgcaagtggctatttggaccactctgtggccttcgttcgaaacgggtatatcttcgcataaaatctagacagaagcattctcagaaaatactttgtgatgattgagtttaaatcacagagctgaacattcctttggatggagcaggtttgagacacactttttgtagaatctacaagtggatatttggacctctctgaggatttcgttggaaacgggataactgcacctaactaaacggaaagcattctcagaaactgctttgtgatgattgcattcacctcacagtagttgaacattcctattgatagagcagtttggaaacactcttgttgtggaatgtgcaagtggagatttggagcgctttgaggcctatggtagtaaagggaatagcttcatagaaaaactagacagatgcattctcaggaactttttggtgatgtttgtattcaactcccagagttgaactttcctttggaaagagcagctatgaaacactctttttctagaatctgcaagtggacgtttggagggctttgtggtttgtggtggaaaaggaaatatcttcacctaaatactagatagaagcattctcagaagcttctctgtgatgactgcattcaactcacgggagttgaacactccttttgagagcacagttttgaaactctctttctgtggcatctgcaaggggacatgtagacctctttgaagatttcgttggaaacggaatcatcttcacataaaatctatacagaagcagtctcagaatcttctttgtgatgtttgcattcaaatcccagagttgaactttcctttcaaagttcacgtttgaaacactctttttgcaggatctacaagtggatatttggaccactctgtgtccttcgttcgaaacgggtatatcttcacatgacatctagacagaagctttctcagaaaattctttgggatgattgagtggaactcacagagctgaacattccttgtgatgtagcagtttagaaacacactttctgcagaatctgcaagtgcatatttggacctctctgaggaattcgttggaaacgggataatttcagctgactaaacagaagcattctcagaaccttcttcgtgatgtctgcattcaactcacagtgtggaacctttctttgatagttcaggtttgaaacactctttttgtagaaactgcaaggggataattgcacttctttgaggcctaccgtagtaaaggaaataacttcctatagaaaggagacagaagcattctcagaaccctcttcgtgatgtttgcattcaactcacagtgctgaacctttctttgatagttcagctttgaaacactcttcttgtagaaactgcaagtggatatttggtcctttctgaggatttcgttggaaacgggataaaccgcacagaactaaacagaagcattctcagaaccttcttcgtgatgtttgcattcaactcacagtgttgaacctttctttgatagttcaggtttgaaacggtctttctgtagaaactgcaagtagatatttggacctctctgaggatttcattggaaacgggataaaccgcacagaattaaaacagaagcattcacagaaaactcttggtgacgactgagtttaactcacagagctgaacattcctttggatggagcagtttcaaaacacactatttgtagaatctgcaagtggatatgtgggcctctctgaggatttcgttggaaacgggataaaccgcacagaactaaaacagaagcattctcagaaactactttgtgatgattgcattcaagtcacagagttgaacattccctttgacagagcagtttggaaactctctttgtgtagaatctgcaagtggagatatggaccgctttgaggcctatggtagtaaaggaaatagcttcatataaaagctagacagtagcattctcagaaacttctttgtgatgcttgcattcaactcacagagttgaactttcctttcgagagagaagctttgaaacagtctttttccagaatctgcaagtggacatttggagggctttgaggcctgtggtggaaaaggaattatcttcccgtaaaagcctagatagaagccttctcagaaacttctctgtgatgattgcattcaactcacagagttgaaggttccttttcaaagagcagtttccaatcactctttctgtggagtctgcaagtggatatttggacctattttgaagatttcgttggaaacgggagaatcttcacaggaaagctaaacagaagcattctcagaaacttcttggtgatgtttgcattcaaatcccagagtagaaccttcctttgatagttcaggtttgaaacactctttttgtaggatctgcaagtggatatttggaccactctgtggccttcgttcgaaacgggtatatcttcgcataaaatctagacagaagcattctcagaaaatactttgtgatgattgagttgaactcacagagctgaacattcctttggatggagcaggtttgagacacactttttgtagaatctacaagtggatatttggacctctctgaggatttcgttggaaacgggataactgcacctaactaaacggaagcattctcagaaactgctttgtgatgattgcattcacctcacagagttgaacattcctattgatagagcagtttggaaacactcttgttgtggaatgtgcaagtggagatttggagcgctttgaggtctatggtagtaaagggaatagcttcatagaaaaactagacagatgcattctcaggaactttttggtgatgtttgtattcaactcccagagttgaactttcctttggaaagagcagctatgaaacactctttttctagaatctgcaagtggacgtttggagggctttgtggtttgtggtggaaaaggaaatatattcacctaaatactagatagaagcattctcagaagcttctctgtgatgactgcattcaactcacggagttgaacactccttttgagagcgcagttttgaaactctctttctgtggcatctgcaaggggacatgtagacctctttgaagatttcgttggaaacggaatcatcttcacttaaaaactatacagaagcagtctcagaatcttctttgtgatgtttgcattcaaatcccagagttgaactttcctttcaaagttcacgtttgaaacactctttttgcaggatctacaagtggatatttggaccactactgtgtccttcgttcgaaacgggtatatcttcacatgacatctagacagaagctttctcagaaaattctttgggatgattgagtggaactcacagagctgaacattccttgcgatgtagcagtttagaaacacactttctgcagaatctgcaagtgcatatttggacctctctgaggaattcgttggaaacgggataatttcagctgactaaacagaagcattctcagaaccttcttcgtgatgtctgcattcaactcacagtgtggaacctttctttgatagttcaggtttgaaacactctttttgtagaaactgcaaggggataattgcacttctttgaggcctaccgtagtaaaggaaataacttcctatagaaagaagacagaagaattctcagagccctcttcgtgatgtttgcattcaactcacagtgctgaacctttctttgatagtgcagctttgaaacactctttttgtagaaactgcaagtggatgtttggtcctctctgaggatttcgttggaaacgggataaaccgcacagaactaaaacagaagcattctcagaaccttcttcgtgatgtttgcattcaactcacagtgttgaacctttctttgatagttcaggtttgaaacggtctttctgtagaaactgcaagtagatatttggaccgctctgaggatttcgttggaaacgggataacccgcacagaactaaaacagaagcattcacaggaaaactcttggtgacgactgagtttaactcacagagctgaacattcctttggatggagcagtttcgaaacacactatttgtagaatgtgcaagtggatatttgggcctctctgaggatttcgttggaaacgggataaaccgcacagaactaaacagaagcattctcagaaactactttgtgatgattgcattcaagtcacagagttgaatattccctttgacagagcactttggaaactctcgctgtgtagaatctgcaagtggagatatggaccgctttgaggcctatggtagtaaaggaaatagcttcatagaaaaactagacagtagcattctcagaaactcctttgtgatgtttgcattcaactcacagagttgaacattccttttgagagacaagctttgaaacactctttctctagaatctgcaagtggatatttggagggctttgaggcctgtggtggaaagggaattctcttccagtaaaaactagatagaagcattgtcaggaacttgtttgtgatggttgcattcaactcacagagttgaaggttccttttcaaacagcagtttccaagcacgccttctgtggaatctgcaagtggatatttggacctctttgaagatatcgttggaaacgggataatcttcacagaaaagctaaacagaagcattctcagaaacttctctgtgatgtttgtgttcaactcccagagtttcacattgcttttcatagagtagttctgaaacatgcttttcgtagtgtctgcaagtggacatttggagcgctttcaggcctgtggtggaaaaccgaattatggtcacataaaaactggagagaagccttctcagaaacttctctgtgatgattgcattcaactcacagagttgaaccctcctatggatagagcagtgttgaaactctctttttgtggaatctgcaagtggatatgtggacctctccgaagatgtctttggaaacgggaatatcttcacataaaaactaaacagaagcattctcagaaacttcctggtgatgtttgcattcaaatcccagagttgaaccttcctttgatagttcaggtttgaaacactctttttgtaggatctgcaagtggatatttggaccactctgtggccttcgttcgaaacgggtacatcttcgcataaaatctagacagaagcattctcagaaaatactttgtgatgattgagttgaactcacagagctgaacattcctttggatggagcaggtttgagacacactttttgtagaatctacaagtggatatttggacctctctgaggatttccttggaaacgggataactgcacctaactaaacggaagcattctcagaaactgctttgtgatgattgcattcacctcacagagttgaacattcctattgatagagcagtttggaaacactcttgttgtggaatgtgcaagtggagatttggagcgctttgaggcctgtggtagtaaagggaatagcttcatagaaaaactagacagatgcattctcaggaactttttggtgatgtttgtattcaactcccagagttgaactttcctttggaaagagcagctatgaaacactctttttctagaatctgcaagtggacgtttggagggctttgtggtttgtggtggaaaaggaaatatcttcacctaaatactagacagaagcattctcagaagcttctctgtgatgactgcattcaactcacggagttgaacactccttttgagagcgcagttttgaaactctctttctgtggcatctgcaaggggacatgtagacctctttgaagatttcgttggaaacggaatcatcttcacataaaaactatacagaagcagtctcagaatcttctttgtgatgtttgcattcaaatcccagagttgaactttcctttcaaagttcacgtttgaaacactctttttgcaggatctacaagtggatatttggaccactctgcgtccttcgttcgaaacgggtatatcttcacatgacatctagacagaagctttctcagaaaattctttgggatgattgagtggaactcacagagctgaacattccttgcgatgtagcagtttagaaacacactttctgcagaatctgcaagtgcatatttggacctctgtgaggaattcgttggaaacgggataatttcagctgactaaacagaagcattctcagaaccttcttcgtgatgtctgcattcaactcacagtgtggaacctttctttgatagttcaggtttgaaacactctttttgtagaaactgcaaggggataattgcacttctttgaggcctaccgtagtaaaggaaataacttcctatagaaagaagacagaagcattctcagaaccctcttcgtgatgtttgcattcaactcacagtgctgaacctttctttgatagttcagctttgaaacactcttcttgtagaaactgcaagtggatatttggtcctctctgaggatttcgttggaaacgggataaaccgcacagaactaaacagaagcattctcagagccctcttcgtgatgtttgcattcaactcacagtgctgaacctttctttgatagtgcagctttgaaacactctttttgtagaaactgcaagtggatatttggtcctctctgaggatttcgttggaaacgggataaaccgcacagaactaaaacagaagaattctcagaaccctcttcgtgatgtttgcattcaacacacagtgctgaacctttctttgatagttcagctttgaaacactctttttgtagaaaatgcaagtggatatttggtcctctctgaggatttcgttggaaacgtgataaaccgcacagaactaaacagaagcattcacagaaaactcttggtgacgactgagtttaactcacagagctgaacattcctttggatggagcagtttcgaaacacactatttgtagaatctgcaagtggatatttgggcctctctgaggatttcgttggaaatgggataaaccgcacagaactaaaacagaagcattctcagaaaatactttgtgatgattgcattcaagtcacagagttgaacaatccctttgacagagcagtttggaaactctctttgcgtagaatctgcaagtggagatatggaccgctttgaggcctatggtagtaaaggaaatagcttcatataaaagctagacagcagcattctcagaaacttctttgtgatgcttgcattcaactcacagagttgaactttcctttcgagagagaagctttgaaacactctttttccagaatctgcaagtggacatttggagggctttgaggcctgtggtggaaaaggaattaacttcccgtaaaagctagatagaagcattgtcagaaacttctttgtgatgattgcattcaactcacagagttgaaggttccttttcaaacagcagtttccaatcactctttctgtggaatctgcaagtggatatttgggcctctctgaggatttcgttggaaacgggataaaacgcacagaactaaaacagaagcattctcagaaacttctctgtgatgtttgtgttcaactcccagagtttcacgttgcttttcatagagtagttctgaaacatgcttttcgtagtgtctgcaagtggacatttggagcgctttcaggcctgtggtggaaaacgaattatggtcacataaaaactggagagaagccttctcagaacttctctgtgatgattgcattcaactcacagagttgaaccctcctatggatagagcagtgttgaaactctctttttgtggaatctgcaagtggatatgtggacctctccgaagatgtctttggaaacgggaatatcttcacataaaaactaaacagaagcattctcagaaacttcttggtgatgtttgcattcaaatcccagagttgaaccttcctttgatagttcaggtttgaaacactctttttgtaggatctgcaagtggctatttagaccactctgtggccttcgttcgaaacgggtatatcttcgcataaaatctagacagaaacattctcagaaaatactttgtgatgattgagtttaaatcacagagctgaacattcctttggatggagcaggtttgagacacactttttgtagaatctacaagtggatatttggacctctctgaggatttcgttggaaacgggataactgcacctaactaaacggaagcattctcagaaactgctttgtgatgattgcattcacctcacagagttgaacattcctattgatagagcagttggaaacactcttgttgtggaatgtgcaagtggagatttggagagctttgaggcctatggtagtaaagggaatagcttcatagaaaaactggacagatgcattctcaggaactttttggtgatgtttgtattcaactcccagagttgaactttcctttggaaagagcagctatgaaacactctttttctagaatctgcaagtggacgattggagggctttgtggtttgtggtggaaaaggaaatatcttcacctaaatactagagagaagcattctcagaagcttctctgtgatgactgcattcaactcacggagttgaacactccttttgagagcgcagttttgaaactctgtttctgtggcatctgcaaggggacatgtagacctcttagaagatttcgttggaaacggaatcatcttcacatcaaaactatacagaagcagtctcagcatcttctttgtgatgtttgcattcaaatcccaggagttgaactttcctttcaaagttcacgtttgaaacactctttttgcaggatctacaagtggatatttggaccactctgtgtccttcgttcgaaacgggtatatcttcacatgacatctagacagaagctttctcagaaaattctttgggatgattgagttgaactcacagagctgagcattccttgcgatgtagcagtttagaaacacactttctgcagaatctgcaagtgcatatttggacctctgtgaggaattcgttggaaacgggataatttcagctgactaaacagaagcattctcagaaccttcttcgtgatgtctgcattcaactcacagtgtggaacctttctttgatagttcaggtttgaaacactctttttgtagaaactgcaaggggataattgcactctttgaggagtaccgtagtaaaggaaataacttcctataaaaagaagacagaagcattctcagaaccctcttcgtgatgtttgcattcaactcacagtgctgaacctttctttgatagttcagctttgaaacactctttttgtagaaactgcaagtgcatatttggtcctctctgagcatttcgttggaaacgggataaactgcacagaactaaacagaagcattctcagaaccttcttcgtgatgtttgcattcaactcacagtgttgaacctttctttgatagttcaggtttgaaacggtctttctgtagaaactgcaagtagatatttggacctctctgaggatttcgttggaaacgggataacccgcacagaactaaaacagaagcattcacagaaaactcttggtgacgactgagtttaactcacagaagctgaacattcctttggatggagcagtttcgaaacacactatttgtagaatgtgcaagtggatatttgggcctctctgaggatttcgttggaaacgggataaaccgcacagaactaaaaagaagcattctcagaaactactttgtgatgattgcattcaagtcacagagttgaacattccctttgacagagcagtttggaaactctctttgtgtagaatctgcaagtggagatatggaccgctttgaggcctatggtagtaaaggaaatagcttcatataaaagctagacagtagcattctcagaaacttctttgtgatgcttgcattcaactcacagagttgaactttcctttcgagagagaagctttgaaacactctttttccagaatctgcaagtggacatttggagggctttgaggcctgtggtggaaaaggaattatcttcccgtaaaagctagatggaagcattgtcagaaacttctttgtgatgattgcattcaactcacagagttgaaggttccttttcaaagagcagtttccaatcactctttctgtggaatctgcaagtggatatttggacctattttgaagatttcgttggaaacgggagaatcttcacaggaaagctaaacagaagcattctcagaaacttctctgtgatgtttgtgttcaactcccagagtttcacattgcttttcatagagtagttctgaaacatgcttttcgtagtgtctacaagtggacatttggagcgcttccaggcctgtggtggaaaacgaattatggtcacataaaaactggagagaagccttctcagaaacttctctgtgatgattgcattcaactcacagaagttgaaccctcctatggatagagcagtgttgaaactctctttttgtggaatctgcaagtggatatgtggacctctttgaagatgtctttggaaacgggaatatcttcacataaaaactaaacggaagcattctcagaatcttcttggtgatgtttgcattcaaatcccagagttgaaccttcctttgatagttcaggtttgaaacactctttttgtaggatctgcaagtggatatttggaccactctgtggccttcgttcgaaacgggtatatcttcgcataaaatctagacagaagcattctcagaaaatactttgtgatgattgagtttaactcacagagctgaacattcctttggatggagcaggtttgagacacactttttgtagaatctacaagtggatatttggacctctctgaggatttcgttggaaacgggataactgcacctaactaaacggaagcattctcagaaactgctttgtgatgattgcattcacctcacagagttgaacattcctattgatagagcagtttggaaacactcttgttgtggaatgtgcaagtggagatttggagcgctttgaggcctacggtagtaaagggaatagcttcatagaaaaactagacagatgcattctcaggaactttttggtgatgtttgtattcaactcccagagttgaactttcctttggaaagagcagctatgaaacactctttttctagaatctgcaagtggacgtttggagggctttgtggtttgtggtggaaaaggaaatatcttcacctaaatactagatagaagcattctcagaagcttctctgtgatgactgcattcaactcacggagttgaacactccttttgagagcgcagttttgaaactctctttctgtggcatccgcaaggggacatgtggacctctttgaaggtttcgttggaaacggaatcatcttcacataaaaactatacagaagcagtctcagaatcttctttgtgatgtttgcattcaaatcccagagttgaactttcctttcaaagttcacgtttgaaacactctttttgcaggatctacaagtggatatttggaccactctgtgtcctccgttcgaaacgggtatatcttcacatgacatctagacagaagctttctcagaaaattctttgggatgattgagttgaactcacagagctgaacattccttgcgatggagcagtttagaaacacactttctgcagaatctgcaagtgcatatttggacctctctgaggaattcgttggaaacgggataatttcagctgactaaacagagcattctcagaaccttcttcgtgatgtctgcattcaactcacagtgtggaacctttctttgatagttcaggtttgaaacactctttttgtagaaactgcaaggggataattgcacttctttgaggcctaccgtagtaaaggaaataacttcctatagaaagaagacagaagaattctcagagcccgtcttcgtgatgtttgcattcaactcacagtgctgaacctttctttgatagtgcagctttgaaacactctttttgtagaaactgcaagtggatgtttggtcctctctgaggatttcgttggaaacggaataaaccgcacagaactaaaacagaagcattcacagaaaactcttggtgacgactgagtttaactcacagagctgaacattcctttggatggagcagtttcgaaacacactatttgtagaatctgcaagtggatatttgggcctctctgaggatttcgttggaaacgggataaaacgcacagaactaaaacagaagcattctcagaaactactttgtgattattgcattcaagtcacagagttgaacattccctttgacagagcagtttggaaactctctttgtgtagaatctgcaagtggagatatggaccgctttgaggcctatggtagtaaaggaaatagcttcatataaaacctagacagtagcattctcagaaacttctttgtgatgcttgcattcaactcacagagttgaactttcctttcgagagagaagctttgaaacactctttttccagaatgtgcaagtggacatttggggagctttgaggcctgtggtggaaaaggaattatcttcccgtaaaagctagatagaagcactgtcagaaacttctttgtgatgattgcattcaactcacagagttgaaggttccttttcaaacagcagtttccaatcactctttctgtggaatctgcaagtggatatttggacctattttgaagatttcgttggaaacgggataatcttcacagaaaagctaaacagaagcattctcagaaacttctctgtgatgtttgtgttcaactcccagagtttcacattgcttttcatagagtagttctgaaacatgcttttcgcagtgtctgcaagtggacatttggagcgctttcaggcctgtggtggaaaacgaattatggtcacataaaaactggagagaagccttctcagaaacttctctgtgatgattgcattcaactcacagagttgaaccctcctatggatagagcagtgttgaaactctctttttgtggaatctgcaagtggatatgtggacctctccgaagatgtctttggaaacgggaatatcttcacataaaaactaaacagaagcattctcagaaacttcttggtgatgtttgcattcaaatcccagagttgaaccttcctttgatagttcaggtttgaaacactctttttgtaggatctgcaagtggatatttgtaccactctgtggccttcgttcgaaacgggtacatcttcacataaaatctagacagaagcattctcagaaaatactttgtgatgattgagtttaactcacagagctgaacattcctttggatggagcaggtttgagacacactttttgtagaatctacaagtggatatttggacctctctgaggatttcgttggaaacgcgataactgcacctaactacacggaagcattctcagaaactgctttgtgatgattgcattcacctcacagagttgaacattcctattgatagagcagtttggaaacactcttgttgtggaatgtgcaagtggagatttggagcgctttgaggcctatggtagtaaagggaatagcttcatagaaaaattagacagatgcattctcaggaactttttggtgatgtttatattcaactcccacagttgaactttcctttggaaagagcagctatgaaacactctttttctagaatctgcaagcggacgtttggagggctttgtggtttgtggtggaaaaggaaatatcttcacctaaatactagacagaagcattctcagaagcttctctgtgatgactgcattcaactcacggagttgaacactccttttgagagcgcagttttgaaactctgtttctgtggcatctgcaaggggacatgtagacctctttgaagatttcattggaaacggaatcatcttcacataaaaactatacagaagcagtctcagaatcttctttgtgatgtttgcattcaaatcccagagttgaactttcctttcaaagttcacgtttgaaacactctttttgcaggatctacaagtggatatttggaccactctgtgtccttcgttcgaaacgggtatatcttcacatgacatctagacagaagctttctcagaaaattctttgggatgattgagtggaactcacagagctgaacattccttgcgatgtagcagtttagaaacacactttctgcagaatctgcaagtgcatatttggacctctctgaggaattcgttggaaacgggataatttcagctgactaaacagaagcattctcagaaccttcttcgtgatgtctgcattcaactcacagtgtggaacctttctttgatagttcaggtttgaaacactctttttgtagaaactgcaaggggataattgcactctttgaggagtaccgtagtaaaggaaataacttcctataaaaagaagacagaagcattctcagaaccctcttcgtgatgtttgcattcaactcacagtgctgaacctttctttgatagttcagctttgaaacactctttttgtagaaactgcaagtggatatttggtcctctctgaggatttcgttggaaacgggataaaccgcacagaactaaacagaagcattctcagaaccttcttcgtgatgtttgcattcaactcaacagtgttgaacctttctttgatagttcaggtttgaaacggtctttctgtagaaactgcaagtagatatttggaccgctctgaggatttcgttggaaacgggataacccgcacagaactaaaacagaagcattcacagaaaactcttggtgacgactgagtttaactcacagagctgaacattcctttggatggagcagtttcgaaacacactatttgtagaatgtgcaagtggatatttgggcctctctgaggatttcgttggaaacgggataaaacgcacagaactaaaacagaagcattctcagaaactaatttgtgatgattacattcaagtcacagagttgaacattccctttgacagagcagtttggaaactctctttgtgtagaatctgcaagtggagatatagaccgctttgaggcctatggtagtaaaggaaatagcttcatataaaagctagacagtagcattctcagaaacttctttgtgatgcttgcattcaactcacagagttgaactttcctttcgagagagaagctttgaaacactctttttccagaatctgcaagtggacatttggagggctttgaggcctgtggtggaaaaggaattatcttcccgtaaaagctagatagaagcattgtcagaaacttctttgtgatgattgcattcaactcacagagttgaaggttccttttcaaacagcagtttccaatcactctttctgtggaatctgcaagtggatatttcgacctctttgaagatttcgttggaaacgggagaatcttcacagaaaagctaaacagaagcattctcagaaacttctctgtgatgtttgtgttcaactcccagagtttcacgttgcttttcatagagtagttctgaaacatgcttttcgtagtgtctgcaagtggacatttggagcgctttcaggcctgtggtggaaaacgaattatggtcacataaaaactggagagaagccttctcagaaacttctctgtgatgattgcattcaactcacagagttgaaccctcctatggatagagcagtgttgaaactctctttttgtggaatctgcaagtggatatgtggacctctccgaagatgtctttggaaacgggaatatcttcacataaaaactaaacagaagcattctcagaaacttcttggtgatgtttgcattcaaatcccagagttgaaccttcctttgatagttcaggtttgaaacactctttttgtaggttctgcaagtggatatttggaccactctgtggccttcgttcgaaacgggtacatcttcgcataaaatctagacagaagcattctcagaaaatactttgtgatgattgagttgaactcacagagctgaacattcctttggatggagcaggtttgagacacactttttgtagaatctacaagtggatatttggacctctctgaggatttcgttggaaacgggataactgcacctaactaatcggaagcattctcagaaactgctttgtgatgattgcattcacctcacagagttgaccattcctattgatagagcagtttggaaacactcttgttgtggaatgtgcaagtggagatttggagcgctttgaggcctatggtagtaaagggaatagcttcatagaaaaactagacagatgcattctcaggaactttttggtgatgtttgtattcaactcccagagttgaactttcctttggaaagagcagctatgaaacactctttttctagaatctgcaagtggacgtttggagggctttgtggtttgtggtggaaaaggaaatatcttcacctaaatactagatagaagcattctcagaagcttctctgtgatgactgcattcaactcacgtagttgaacactccttttgagagcgcagttttgaaactctctttctgtggcatctgcaaggggacatgtagacctctttgaagatttcgttggaaacggaatcatcttcacataaaaactatacagaagcagtctcagaatcttctttgtgatgtttgcattcaaatcccagagttgaacttttctttccaagttcacgtttgaaacactctttttgcaggatctacaagtggatatttggaccactctgtgtccttcgttcgaaacgggtatatcttcacatgacatctagacagaagctttctcagaaaattctttgggatgattgagttgagcaaacagagctgaacactccttgcgatgtagcagtttagaaacacactttctgcagaatctgcaagtgcatatgtggacctctctgaggaattccttggaaacgggataatttcagctgactaaacagaagcattctcagaaccttcttcgtgatgtctgcattcaactcacagtgtggaacctttctttgatagttcaggtttgaaacactctttttgtagaaactgcaaggggatcattgcacttctttgaggcctaccgtagtaaaggagataacttcctataaaaagaagacagaagcattctcagaaccctcttcgtgatgtttgcattcaactcacggtgctgaacccttctttgatagttcagctttgaaacactctttttgtagaaactgcaagtggatatttggtcctctctgaggatttcgttggaaacgggataaaccgcacagaactaaacagaagcattctcagaaccttcttcttgatgtttgcattcaactcacagtgttgaacctttctttgatagttcaggtttgaaacggtctttctatagaaactgcaagtagatatttggtcctctcggaggatttctttggaaacgggataaaccgcacagaactaaaacagacagcattcacagaaaaactcttggtgacgactgagtttaactcacagagctgaacattcctttggatggagcagtttcgaaacacactatttgtagaatgtgcaagtggatatgtgggcctctctgaggatttcgttggaaacgggataaaccgcacagaactaaacagaagcattctcagaaactactttgtgatgattgcattcaagtcacagagttgaacattccctttgacagagcagtttggaaactctctttgtgtagaatctgcaagtggagatatggaccgctttgaggcctatggtagtaaaggaaatagcttcatagaaaagctagacagtagcattctcagaaacttctttgtgatgcttgcattcaactcacagagttgaactttcctttcgagagagaagctttgaaacactctttttccagaatctgcaagtggacatttggagggctttgaggcctgtggtggaaaaggaattatcttcccgtaaaagctagatagaagcattgtcagaaacttctttgtgatgattgcattcaactcacagagttgaaggttccttttcaaacagcagtttccaatcactctttctgtggaatctgcaagtggatatttcgacctctttgaagatttcgttggaaacgggagaatcttcacagaaaagctaaacagaagcattctcagaaacttctctgtgatgtttgtgttcaactcccagagtttcacgttgcttttcatagagtagttctgaaacatgcttttcgtagtgtctgcaagtggacatttggagcgctttcaggcctgtggtggaaaacgaattatggtcacataaaaactggagagaagccttctcagaaacttctctgtgatgattgcattcaactcacagagttgaaccctcctatggatagagcagtgttgaaactctctttttgtggaatctgcaagtggatatgtggacctctccgaagatgtctttggaaacgggaatatcttcacataaaaactaaacagaagcattctcagaaacttcttggtgatgtttgcattcaaatcccagagttgaaccttcctttgatagttcaggtttgaaacactctttttgtaggatctgcaagtggctatttggaccactctgtggccttcgttcgaaacgggtatatcttcccataaaatctagacagaagcattctcagaaaatactttgtgatgattgagtttaaatcacagagctgaccattcctttggatggagcaggtttgagacacactttttgtagaatctacaagtggatatttggacctctctgaggatttcgttggaaacgggataactgcacctaactaaacggaagcattctcagcaaactgctttgtgatgattgcattcacctcacagagttgaacattcctattgatagagcagtttggaaacactcttgttgtggaatgtgcaagtggagatttggagcgctttgaggcctatggtagtaaagggaatagcttcatagaaaaactagacagatgcattctcaggaactttttggtgatgtttgtattcaactcccagagttgaactttcctttggaaagagcagctatgaaacactctttttctagaatctgcaagtggacgtttggagggctttgtggtttgtggtggaaaaggaaatatcttcacctaaatactagatagaagcattctcagaagcttctctgtgatgactgcattcaactcacggagttgaacactccttttcagagcgcagttttgaaactctctttctgtggcatctgcaaggggacatgtagacctctttgaagatttcgttggaaacggaatcatcttcacatcaaaactatacagaagcagtctcagaatcttctttgtgatgtttgcattcaaatcccagagttgaactttcctttcaaagttcacgtttgaaacactctttttgcaggatctacaagtggatatttggaccactctgtgtccttcgttcgaaacgggtatatcttcacatgacatctagacagaagctttctcagaaaattcctttgggatgattgagttgagcaaacagagctgaacactccttgcgatgtagcagtttagaaacacactttctgcagaatctgcaagtgcatatgtggacctctctgaggaattcgttggaaacgggataatttcagctgactaaacagaagcattctcagaaccttcttcgtgatgtctgcattcaactcacagtgtggaacctttctttgatagttcaggtttgaaacactctttttgtagaaactgcaaggggataattgcacttctttgaggcctaccgtagtaaaggaaataacttcctataaaaagaagacagaagcattctcagaaccctcttcgtgatgtttgcattcaactcacagtgctgaacctttctttgatagttcagctttgaaacactcttcttgtagaaactgcaagtggatatttggtcctctctgaggatttcgttggaaacgggataaaccgcacagaactaaacagaagaattctcagagccctcttcgtgatgtttgcattcaactcacagtgctgaacctttctttgatagtgcagctttgaaacactctttttgtagaaactgcaagtggatatttggtcctctctgaggatttcattggaaacgggataaaccgcacagaactaaaacagaagcattcacagaaaactcttggtgacgactgagtttaactcacagagctgaacatccctttggatggagcagtttcgaaacacactatttgtagaatgtggaagtggatatttgggcctctctgaggatttcgttggaaacgggataaaccgcacagaactaaacagaagcattctcagaaactactttgtgatgattgcattcaagtcacagagctgaacattccctttgacagagcagtttggaatctctctttgtgtagaatctgcaagtggagatatggaatgctttgaggactatggtagtaaaggaaatagcttcatataaaagctagacagtagcattctcagaaacttctttgtgatgcttgcattcaactcacagagttgaactttcctttcgagagagaagctttgaaacactctttttccagaatctgcaagtggacatttggagggctttgaggcctgtggtggaaaaggaattatcttcccgtaaaagctggatagaagcattgtcagaaacttctttgagatgattgcattcaactcacagagttgaaggttccttttcaaacagcagtttccaaacactatttctgtggaatctgcaagtggatatttggacctctttgaagatttcgttggaaacgggataaccttcacagaaaagctaaacagaagcattctcagaaacttctctgtgatgtttgtgttcaactaccagagtttcacattgcttttcatagagtagttctgaaacatgcttttcgtaatgtctgcaagtggacatttggagcgctttcaggcctgtggtggaaaacgatttatggtcacataaaaactggagagaagccttctcagaaacttctctgtgatgattgcattcaactcacggagttgaaccctcctatggatagagcagtgttgaaactctctttttgtggaatctgcaagtggatatgtggacctctccgaagatgtctttggaaacgggaatatcttcacataaaaactaaacagaagcattctcagaaacttcttggtgatgtttgcattcaaatcccagagttgaaccttcctttgatagttcaggtttgaaacactctttttgtaggacctgcaagtggatatttggaccactctgtggccttcgttcgaaacgggtacatcttcgcataaaatctagacagaagcattctcagaaaatactttgtgatgattgagtttaactcacagagctgaacattcctttggatggagcaggtttgagacacactttttgtagaatctacaagtggatatttggacctctctgaggatttcgttggaaacgggataactgcacctaactaaacggaagcattctcagaaactgctttgtgatgattgcattcacctcacagagttgaacattcctattgatagagcagtttggaaacactcttgttgtggaatgtgcaagtggagatttggagcgctttgaggcctatggtagtaaagggaatagcttcatagaaaaactagacagatgcattctcaggaactttttggtgatgtttgtattcaactcccagagttgaactttcctttggaaagagcagctatgaaacactctttttctagaatctgcaagtggacgtttggagggctttgtggtttgtggtggaaaaggaaatatcttcacctaaatactagatagaagcattctcagaagcttctctgtgatgactgcattcaactcacggagttgaacactccttttgagagcgcagttttgaaactccctttctgtggcatctgcaaggggacatgtagacctctttgaagatttcgttggaaacggaatcatcttcacataaaaactatacagaagcagtctcagaatcttctttgtgatgtttgcattcaaatcccagagttgaactttcctttcaaagttcacgtttgaaacactctttttgcaggatctacaagtggatatttggaccactctgtgtccttcgttcgaaacgggtatatcttcacacgacatctagacagaagctttctcagaaaattctttgggatgattgagtggaactcacagagctgaacattccttgcgatgtagcagtttagaaacacactttctgcagaatctgcaagtgcatatttggacctctctgaggaattcgttggaaacgggataatttcagctgactaaacagaagcattctcagaaccttcttcgtgatgtctgcattcaactcacagtgtggaacctttctttgatagttcaggtttgaaacactctttttgtagaaactgcaaggggataattgcacttctttgaggcctaccgtagtaaaggaaataacttcctatagaaagaagacagaagcattctcagaaccctcttcgtgatgtttgcattcaactcacagtgctgaacctttctttgatagttcagctttgaaactctccttttgtagaaactgcaaatggatatttggtcctctctgaggatttcgttggaaaagggataaaacgcacagaactaaacagaagcattctcagaaccttcttcgtgatgtttgcattcaactcacagtgttgaacctttctttgatagttcaggtttgaaacggtctttctgtagaaactgcaagtagatatttggacctctctgaggatttcgttggaaacgggataaaccgcacagaactaaaacagaagcattcacagaaaactcttggtgacgactgagtttaactcacagagctgaacattcctttggatggagcagtttcgaaacacactatttgtagaatgtgcaagtggatatttaggcctctctgaggatttcgttggaaacgggataaaccgcacagaactaaacagaagcattctcagaaactactttgtgatgattgcattcaagtcacagagttgaacattccctttgacagagcagtttggaaactctctttgtgtagaatctgcaagtggagatatggaccgctttgaggactatggtagtaaaggaaatagcttcatataaaagctaaacagtagcattctcagaaacttctttgtgatgcttgcattcaactcacagagttgaactttcctttcgagagagaagctttgaaacactctttttccagaatctgcaagtagacatttggagggctttgaggcctgtggtggaaaaggaattatcttcccgtaaaagctagatagaagcattgtcagaaacttctttgtgatgattgcattcaactcacagagttgaaggttccttttcaaacagcagtttccaatcactctttctgtggaatctgcaagtggatatttggacctctttgaagatttcgttggaaacgggagaatcttcacagaaaagctaaacagaagcattctcagaaacttctctgtgatgtttgtgttcaactcccagagtttcacattgcttctcatagagtagttctgaaacatgcttttcgtagtgtctgcaagtggacatttggagcgctttcaggcctgtggtggaaaacgaattatggtcacataaaaactggagagaagccttctcagaaacttctctgtgatgattgcattcaactcacagagttgaaccctcctatggatagagcagtgttgaaactctctttttgtggaatctgcaagtggatatgtggacctctccgaagatgtctttggaaacgggaatatcttcacataaaaactaaacagaagcattctcagaaacttcttggtgatgtttgcattcaaatcccagagttgaaccttcctttgatagttcaggtttgaaacactctttttgtaggatctgcaagtggctatttggaccactctgtggccttcgttcgaaacgggtatatcttcgcataaaatctagacagaagcattctcagaaaatactttgtgatgattgagtttaactcacagagctgaacattcctttggatggagcaggtttgagacacactttttgtagaatctacaagtggatatttggacctctcggaggatttcgttggaaacgggataactgcacctaactaaacggaagcattctcagaaactgctttgtgatgattgcattcacctcacagagttgaacattcctattgatagagcagtttggaaacactcttattgtggaatgtgcaagtggagatttggagcgctttgaggcctatggtagtaaagggaatagcttcatagaaaaactagacagatgcattctcaggaactttttggtgatgtttgtattcaactcccagagttgaactttcctttggaaagagcagctatgaaacactctttttctagaatctgcaagtggacgtttggagggctttgtggtttttggtggaaaaggaaatatcttcacctaaatactagatagaagcattctcagaagcttctctgtgatgactgcattcaactcacggagttgaacactccttttgagagcgcagttttggaactctctttctgtggcatctgcaaggggacatgtagacctctttgaagatttcgttggaaacggaatcatcttcacataaaaactatacagaagcagtctcagaatcttctttgtgatgtttgcattcaaatcccagagttgaactttcctttcaaagttcacgtttgaaacactctttttgcaggatctacaagtggatatttggaccactctgtgtccttcgttcgaaacgggtatatcttcacatgacatctagacagaagctttctcagaaaattctttgggatgattgagttgagcaaacagagctgaacactccttgcgatgtagcagtttagaaacaccctttctgcagaatctgcaagtgcatatgtggacctctctgaggaattcgttggaaacgggataatttcagctgactaaacagaagcattctcagaaccttcttcgtgatgtctgcattcaactcacagtgtggaacctttctttgatagttcaggtttgaaacactctttttgtagaaactgcaaggggatcattgcacttctttgaggcctaccgtagtaaaggaaataacttcctataaaaagaagacagaagcattctcagaaccctcttcgtgatgtttgcattcaactcacagtgctgaacctttctttgatagttcagctttgaaacactcttcttgtagaaactgcaagtggatatttggtcctctctgaggatttcgttggaaacgggataaaccgcacagaactaaacagaagcattctcagaaccttcttcgtgatgtttgcattcaactcacagtgttgaacctttctttgatagttcaggtttgaaacggtctttctgtagaaactgcaagtagatctttggacctctctgaggatttcgttggaaacgggataacccacacagaactaaaacagaagcattcacagaaaactcttggtgacgactgagtttaactcacagagctgaacattcctttggatggagcagtttcgaaacacactatttgtagaatgtgcaagtggatatttgggcctctctgaggatttcgttggaaacgggataaaccgcacagaactaaacagaagcattctcagaaactactttgtgatgattgcattcaagtcacagagttgaacattccctttgacagagcagtttggaaactctctttgtgtagaatctgcaagtggagatatggaccgctttgaggcctatggtagtaaaggaaatagcttcatataaaagctagacagtagcattctcagaaacttctttgtgatgcttgcattcaactcacagagttgaactttcctttcgagagagaagctttgaaacactctttttccagaatctgcaagtggacatttggagggctttgaggcctgtggtggaaaaggaattatcttcccgtaaaagctagatagaagcattgtcagaaacttctttgtgatgattgcattcaactcacagagttgaaggttccttttcaaacagcagtttccaatcactctttctgtggaatctgcaagtggatatttgggcctctctgaggatttcgttggaaacgggataaaacgcacagaactaaaacagaagcattctcagaaacttctctgtgatgtttgtgttcaactcccagagtttcacattgcttttcatagagtagttctgaaacatgcttttcgtagtgtctacaagtggacatttggagcgctttcaggcctgtggtggaaaacgaattatggtcacataaaaactggagagaagccttctcagaaacttctctgtgatgattgcattcaactcacagagttgaaccctcctatggatagagcagtgttgaaactctctttttgtggaatctgcaagtggatatgtggacctctccgaagatgtctttggaaacgggaatatcttcacataaaaactaaacagaagcattctcagaaacttcttggtgatgtttgcattcaaatcccagagttgaaccttcctttgatagttcaggtttgaaacactctttctgtaggatctgcaagtggctatttggaccactctgtggccttcgttcgaaacgggtatatcttcgcataaaatctagacagaagcattctcagaaaatactttgtgatgattgagtttaaatcacagagctgaccattcctttggatggagcaggtttgagacacactttttgtagaatctacaagtggatatttggacctctctgaggatttcgttggaaacgggataactgcacctaactaaacggaagcattctcagaaactgctttgtgatgattgcattcacctcacagagttgaacattcctattgatagagcagtttggaaacactcttgttgtggaatgtgcaagtggagatttggagcgctttgaggcctatggtagtaaagggaatagcttcatagaaaaactagacagatgcattctcaggaactttttggtgatgtttgtattcaactcccagagttgaactttcctttggaaagagcagctatgaaacactctttttctagaatctgcaagtggacgtttggagggctttgtggtttgtggtggaaaaggaaatatcttcacctaaatactagatagaagcattctcagaagcttctctgtgatgactgcattcaactcacggagttgaacactccttttgagagcgcagttttgaaactctctttctgtggcatctgcaaggggacatgtagacctctttgaagatttcgttggaaacggaatcatcttcacataaaatctatacagaagcagtctcagaatcttctttgtgatgtttgcattcatatcccagagttgaactttcctttcaaagttcacgtttgaaacactctttttgcaggatctacaagtggatatttggaccactctgtgtccttcgttcgaaacgggtatatcttcacatgacatctagacagaagctttctcagaaaattctttgggatgattgagtggaactcacagagctgaacattccttgcgatgtagcagtttagaaacacactttctgcagaatctgcaagtgcatatttggacctctctgaggaattcgttggaaacgggataatttcagctgactaaacagaagcattctcagaaccttcttcgtgatgtctgcattcaactcacagtgtggaacctttctttgatagttcaggtttgaaacactctttttgttgaaactgcaaggggataattgcacttctttgaggcctactgtagcaaaagaaataacttcctataaaaagaagacagaagcattctcagaaccctcttcgtgatgtttgcattcaaatcacagtgctgaacctttctttgatagttcagcattgaaacactctttttgtagaaactgcaagtggatatttcgtcctctctgaggatttcgttggaaacgggataaaccgcacagaactaaacagaagcattctcagaacattcttcgtgatgtttgcattcaactcacagtgctgaacctttctttgatagttcagctttgaaacactctttttgtagaaactgcaagtggatatttggacctctctgaggatttcgttggaaacgggataaactgcacagaactaaaacagaagcattgtcagaaacttctttgtgatgattgcattcaactcacagagttgaaggttccttttcaaacagcagtttccaatcactctttctgtggaatctgcaagtggatatttgggcctctctgaggatttcgttggaaacgggataaaacgcacagaactaaaacagaagcattctcagaaacttctctgtgatgtttgtgttcaactcccagagtttcacgttgcttttcatagagtagttctgaaacatgcttttcgtagtgtctgcaagtggacatttggagcgctttcaggcctgtggtggaaaacgaattatggtcacataaaaactggagagaagccttctcagaaacttctctgtgatgattgcattcaactcacagagttgaaccctcctatggatagagcagtgttgaaactctctttttgtggaatctgcaagtggatatgtggacctctccgaagatgtctttggaaacgggaatatcttcacataaaaactaaacagaagcattctcagaaacttcttggtgatgtttgcattcaaatcccagagttgaaccttcctttgacagttcaggtttgaaacactctttttgtaggatctgcaagtggatatttggaccactctgtggccttcgttcgaaaagggtacatcttcgcataaaatctagacagaagcattctcagaaaatactttgtgatgattgagtttaaatcacagagctgaccattcctttggatggagcaggtttgagacacactttttgtagaatctacaagtggatatttggacctctctgaggatttcgttggaaacgggataactgcacctaactaaacggaagcattctcagaaactgctttgtgatgattgcattcacctcacagagttgaacattcctattgatagagcagtttggaaacactcttgttgtggaatgtgcaagtggagatttggagcgctttgaggcctgtggtagtaaagggaatagcttcatagaaaaactagacagatgcattctcaggaactttttggtgatgtttgtattcaactcccagagttgaactttcctttggaaagagcagctatgaaacactctttttctagaatctgcaagtggacgtttggagggctttgtggtttgtggtggaaaaggaaatatcttcacctaaatactagatagaagcattctcagaagcttctctgtgatgactgcattcaactcacggagttgaacactccttttgagagcacagttttgaaactctctttctgtggcatctgcaaggggacatgtagacctctttgaagatttcgttggaaacggaatcatcttcacataaaaactatacagaagcagtctcagaatcttctttgtgatgtttgcattcaaatcccagagttgaactttcctttcaaagttcacgtttgaaacactctttttgcaggatctacaagtggatatttggaccactctgtgtcctttgttcgaaacgggtatatcttcacatgacatctagacagaagctttctcagaaaattctttgggatgattgagttgaactcacagagctgaacattccttgcgatgtagcagtttagaaacacactttctgcagaatctgcaagtgcatatgtggacctctctgaggaattcgttggaaacgggataatttcagctgactaaacagaagcattctcagaaccttcttcgtgatgtctgcattcaactcacagtgtggaacctttctttgatagttcaggtttgaaacactctttttgtagaaactgcaaggggataattgcacttctttgaggcctaccgtagtaaaggaaataacttcctatagaaagaagacagaagcattctcagaaccctcttcgtgatgtttgcattcaactcacagtgctgaaactttctttgatagttcagctttgaaacactctttttgtagaaactgcaagtggatacttggtcctctctgaggatttcgttggaaaagggataaaccgcacagaactaaacagaagcattcacagaaaactcttggtgacgactgagtttaactcacagagctgaacattcctttggatggagcagtttcgaaacacactatttgtagaatctgcaagtggatatttgagcctctctgaggatttcgatggaaacgggataaaccgcacagaactaaaacagaagcattcacagaaaactcttggtgacgactgagtttaactcacagagctgaacattcctttggatggagcagtttcgaaacacactatttgtagaatgtgcaagtggatatttgggcctctctgaggatttcgttggaaacgggataaaccgcacagaactaaacagaagcattctcagaaactactttgtgatgattgcattcaagtcacagagttgaacattccctttgacagagcagtttggaaactctctttgtgtagaatctgcaagtggagatatggaccgctttgaggcctatggtagtaaaggaaatagcttcatataaaagctagacagtaagcattctcagaaacttctttgtgatgcttgcattcaactcacagagttgaactttcctttcgagagagaagctttgaaacactctttttccagaatgtgcaagtggacatttggggagctttgaggcctgtggtggaaaaggaattatcttcccgtaaaagctagatagaagcattgtcagaaacttctttgtgatgattgcattcaactcacagagatgaaggttcctttacaaacagcagtttccaaacactctttctgtggaatctgcaagtggatatttggacctctttgaagatttcgttggaaacgggagaatccttcacagaaaagctaaacggaagcattctcagaaacttctctgtgatgtttgtgttcaactcccagagtttcacattgcttttcatagagtagttctgaaacatgcttttcgtagtgtctgcaagtggacatttggagcgctttcaggcctgtggtggaaaacgaattatggtcccataaaaactggagagaagccttctcagaaacttctctgtgatgattgcattcaactcacatagttgaaccctcctatggatagagcagtgttgaaactctctttttgtggaatctgcaagtggatatgtggacctctccgaagatgtctttggaaacgggaatatcttcacataaaaactaaacagaagcattctcagaaacttcttggtgatgtttgcattcaaatcccagagttgaaccttcctttgatagttcaggtttgaaacactctttttgtaggatctgcaagtggatatttggaccactctgtggccttcgttcgaaacgggtatatcttcgcataaaatctagacagaagcattctcagaaaatactttgtgatgattgagtttaactcacagagctgaacattcctttggatggagcaggtttgagacacactttttgtagaatctacaagtggatatttggacctctctgaggatttcgttggaaacgcgataactgcacctaactaaacggaagcattctcagaaactgctttgtgatgattgcattcacctcacagagttgaacattcctattgatagagcagtttggaaacactcttgttgtggaatgtgcaagtggagatttggagcgctttgaggcctgtggtagtaaagggaatagcttcatagaaaaactagacagatgcattctcaggaactttttggtgatgtttgtattcaactcccagagttgaactttcctttggaaagagcagctatgaaacactctttttctagaatctgcaagtggacgtttggagggctttgtggtttgtggtggaaaaggaaatatcttcacctaaatactagagagaagcattctcagaatcttctctccgatgactgcattctactcacggaattgaacactcctttggagagcgcagttttgaaactctctttctgtggcatccgcaaggggacatgtggacctctttgaagatttcgttggaaacggaatcatcttcacataaaaactatacagaagcagtctcagaatcttctttgtgatgtttgcattcaaatcccagagttgaactttcctttcaaagttcacgtttgaaacactctttttgcaggatctacaagtggatatttggaccactctgtgtccttcgttcgaaacgggtatatcttcacatgacatctagacagaagctttctcagaaaattctttgggatgattgagtggaactcacagagctgaacattccttgcgatgtagcagtttagaaacacactttctgcagaatctgcaagtgcatatttggacctctctgaggaattcgttggaaacgggataatttcagctgactaaacagaagcattctcagaaccttcttcgtgatgtctgcattcaactcacagtgtggaacctttctttgatagttcaggtttgaaacactctttttgtagaaactgcaaggggataattgcacttctttgaggcctaccgtagtaaaggaaataacttcctatagaaagaagacagaagcattctcagaaccctcttcgtgatgtttgcattcaactcacagtgctgaacctttctttgatagttcagctttgaaacactcttcttgtagaaactgcaagtggatatttggtcctctctgaggatttcgttggaaacgggataaaccgcacagaactaaacagaagaattctcagagccctcttcgtgatgtttgcattcaactcacagtgctgaacctttctttgatagtgcagctttgaaacactctttttgtagaaactgcaagtggatatttggtcctctctgaggatttcgttggaaacgggataaaccgcacagaactaaaacagaagcattgtcagaaacttctttgtgatgattgcattcaactcacagagttgaaggttccttttcaaacagcagtttccaatcactctttctgtggaatctgcaagtggatatttgggcctctctgaggatttcgttggaaacgggataaaacccacagaactaaaacagaagcattctcagaaacttctctgtgatgtttgtgttcaactcccagagtttcacgttgcttttcatagagtagttctgaaacatgcttttcgtagtgtctgcaagtggacatttggagcgctttcaggcctgtggtggaaaacgaattatggtcacataaaaactggagagaagccttctcagaaacttctctgtgatgattgcattcaactcacagagttgaaccctcctatggatagagcagtgttgaaactctctttttgtggaatctgcaagtggatatgtggacctctccgaagatgtctttggaaacgggaatatcttcacataaaaactaaacagaagcattctcagaaacttcttggtgatgtttgcattcaaatcccagagttgaaccttcctttgagagttcaggtttgaaacactctttttgtaggatctgcaagtggatatttggaccactctgtggccttcgttcgaaacgggtacatcttcgcataaaatctagacagaagcattctcagaaaatactttgtgatgattgagtttaaatcacagagctgaccattcctttggatggagcaggtttgagacacactttttgtagaatctacaagtggatatttggacctctctgaggatttcgttggaaacgggataactgcacctaactaaacggaagcattctcagaaactgctttgtgatgattgcattcacctcacagagttgaacattcctattgatagagcagtttggaaacactcttgttgtggaatgtgcaagtggagatttggagcgctttgaggcctatggtagtaaagggaatagcttcatagaaaaactagacagatgcattctcaggaactttttggtgatgtttgtattcaactcccagagttgaactttcctttggaaagagcagctatgaaacactctttttctagaatctgcaagtggacgtttggagggctttgtggtttgtggtggaaaaggaaatatcttcacctaaatactagatagaagcattctcagaagcttctctgtgatgactgcattcaactcacggagttgaacactccttttgagagcgcagttttgaaactctctttctgtggcatctgcaaggggatatgtagacctctttgaagatttcgttggaaacggaatcatcttcacataaaaactatacagaagcagtctcagaatcttctttgtgatgtttgcattcaaatcccagagttgaactttcctttcaaagttcacgtttgaaacactctttttgcaggatctacaagtggatatttggaccaatctgtgtccttcgttcgaaacgggtatatcttcacatgacacctagacagaagctttctcagaaaattctttgggatgattgagttgaactcacagagctgagtattccttgcgatgtagcagtttagaaacacactttctgcagaatctgcaagtgcatatttggacctctctgaggaattcgttggaaacgggataatttcagctaactaaacagaagcattctcagaaccttcttcgtgatgtctgcattcaactcacagtgtggaacctttctttgatagttcaggtttgaaacactctttctgtagaaactgcaaggggataattgcactctttgaggagtaccgtagtaaaggaaataacttcctataaaaagaagacagaagcattctcagaaccctcttcgtgatgtttgcattcaactcacagtgctgaacctttctttgatagttcagctttgaaacactctttttgtagaaactgcaagtggatatttggtcctctctgagcatttcgttggaaacgggataaactgcacagaactaaacagaagcattctcagaaccttcttcgtgatgtttgcattcaactcacagtgttgaacctttctttgatagttcaggtttgaaacggtctttctgtagaaactgcaagtagatatttggacctctctgaggatttcgttggaaacgggataacccgcacagaactaaaacagaagcattcacagaaaactcttggtgacgactgagtttaactcacagagctgaacattcctttggatggagcagtttcgaaacacactatttgtagaatgtgcaagtggatatgtgggccgctctgaggatttcgttggaaacgggataaaccgcacagaactaaacagaaccattctcagaaactactttgtgatgattgcattcaagtcacagagttgaacattccctttgacagagcagtttggaaactctctttgtgtagaatctgcaagtggagatatggaccgctttgaggcctatggtagtaaaggaaatagcttcatataaaagctagacagtagcattctcagaaacttctttgtgatgcttgcattcaactcacagagttgaactttcctttcgagagagaagctttgaaacactctttttccagaatctgcaagtggacatttggagggctttgaggcctgtggtggaaaaggaattatcttcccgtaaaagctagatagaagcattgtcagaaacttctttgcgatgattgcattcaactcacagagatgaaggttcctttacaaacagcagtttccaaacactctttctgtggaatctgcaagtggatatttggacctctttgaagatttcgttggaaacgggagaatcttcacagaaaatctaaacagaagcattctcagaaacttctctgtgatgtttgtgttcaactcccagagtttcacattgcttttcatagagtagttctgaaacatgcttttcgtagtgtctgcaagtggacatttggagcgctttcaggcctgtggtggaaaacgaattatggtcccataaaaactggagagaagccttctcagaaacttctctgtgatgattgcattcaactcacagatttgaaccctcctatggatagagcattgttgaaactctctttttgtggaatctgcaagtggatatgtggacctctccgaagatgtctttggaaacgggaatatcttcacataaaaactaaacagaagcattctcagaaacttcttggtgatgtttgcattcaaatcccagagttgaaccttcctgtgatagttcaggtttgaaacactctttttgtaggatctgcaagtggatatttggaccactctgtggccttcgttcgaaacgggtacatcttcacataaaatctagacagaagcattctcagaaaatactttgtgatgattgagtttaaatcacagagctgaccattcctttggatggagcaggtttgagacacactttttgtagaatctacaagtggatatttggacctctctgaggatttcgttggaaacgggataactgcacctaactaaacggaagcattctcagaaactgctttgtgatgattgcattcacctcacagagttgaacattcctattgatagagcagtttggaaacactcttgttgtggaatgtgcaagtggagatttggagcgctttgaggcctatggtagtaaagggaatagcttcatagaaaaactagacagatgcattctcaggaactttttggtgatgtttgtattcaactcccagagttgaactttcctttggaaagagcagctatgaaacactctttttctagaatctgcaagtggacgtttggagggctttgtggtttgtggtggaaaaggaaatatcttcacctaaatactagatagaagcattctcagaagcttctctgtgatgactgcattcaactcacggagttgaacactccttttgagagcgcagttttgaaactctctttctgtggcatccgcaaggggacatgtggacctctttgaagatttcgttggaaacggaatcatcttcatatcaaaactatacagaagcagtctcagaatcttctttgtgatgtttgcattcaaatcccagagttgaactttcctttcaaagttcacgtttgaaacactctttttgcaggatctacaagtggatatttggaccactctgtgtcctccgttcgaaacgggtatatcttcacatgacatctagacagaagctttctcagaaaattctttgggatgattgagtggaactcacagagctgaacattccttgagatgtagcagtttagaaacacactttctgcagaatctgcaagtgcatatgtggacctctctgaggaattcgttggaaacgggataatttcagctgactaaacagaagcattctcagaaccttcttcgtgatgtctgcattcaactcacagtgtggaacctttctttgatagttcaggtttgaaacactctttttgtagaaactgcaaggggataattgcacttctttgaggcctaccgtagtaaaggaaataacttcctatagaaagaagacagaagcattctcagaaccctcttcgtgatgtttgcattcaactcacagtgctgaacctttctttgatagttcagctttgaaacactcttcttgtagaaactgcaagtggatatttggtcctctctgaggatttcgttggaaacgggataaaccgcacagaactaaacagaacaattctcagagccctcttcgtgatgtttgcattcaactcacagtgctgaacctttctttgatagtgcagctttgaaacactctttttgtagaaactgctagtggatatttggtccactctgaggatttcgttggaaacgggataagccgcacagaactaaaacagaagcattgtcagaaacttctttgtgatgattgcattcaactcacagagttgaaggttccttttcaaacagcagtttccaatcactctttctgtggaatctgcaagtggatatttgggcctctctgaggatttcgttggaaacgggataaaacgcacagaactaaaacagaagcattctcagaaacttctctgtgatgtttgtgttcaactcccagagtttcacattgcttttcatagagtagttctgaaacatgctttttgtagtgtctgcaagtggacatttggagcgctttcaggcctgtggtggaaaacgaattatggtcccataaaaactggagagaagccttctcagaaacttctctgtgatgattgcattcaactcacagagttgaaccctcctatggatagagcagtgttgaaactctctttttgtggaatctgcaagtggatatgtggacctctccgaagatgtctttggaaacgggaatatcttcacataaaaactaaacagaagcattctcagaaacttcttggtgatgtttgcattcaaatcccagagttgaaccttcctttgatagttcaggtttgaaacactctttctgtaggatctgcaagtggctatttggaccactctgtggccttcgttcgaaacgggtatatcttcgcataaaatctagacagaagcattctcagaaaatactttgtgatgattgagtttaaatgacagagctgaccattcctttggatggagcaggtttgagacacactttttgtagaatctacaagtggatatttggacctctctgaggatttcgttggaaacgggataactgcacctaactaaacggaagcattctcagaaactgctttgtgatgattgcattcacctcacagagttgaacattcctattgatagagcagtttggaaacactcttgttgtggaatgtgcaagtggagatttggagcgctttgaggcctatggtagtaaagggaatagcttcatagaaaaactagacagatgcattctcaggaactttttggtgatgtttgtattcaactcccagagttgaactttcctttggaaagagcagctatgaaacactctttttctagaatctgcaagtggacgtttggagggctttgtggtttgtggtggaaaaggaaatatcttcacctaaatactagatagaagcattctcagaagcttctctgtgatgactgcattcaactcacggagttgaacactccttttgagagcgcagttttgaaactctctttctgtggcatctgcaaggggacatgcagacctctttgaagatttcgttggaaacggaatcatcttcacataaaaactatacagaagcagtctcagaatcttctttgtgatgtttgcattcaaatcccagagttgaactttcctttcaaagttcacgtttgaaacactctttttgcaggatctacaagtggatatttggaccactctgtgtccttcgttcgaaacgggtatatcttcacaggacatctagacagaagctttctcagaaaattctttgggatgattgagtggaactcacagagctgaacattccttgcgatgtagcagtttagaaacacactttctgcagaatctgcaagtgcatatttggacctctctgaggaattcgttggaaacgggataatttcagctgactaaacagaagcattctcagacacccttcttcgtgatgtctgcattcaactcacagtgtggaacctttctttgatagttcaggtttgaaacactctttttgtagaaactgcaaggggataattgcacttctttgaggcctaccgtagtaaaggaaataacttcctatagaaagaagacagaagcattctcagaaccctcttcgtgatgtttgcattcaactcacagtgctgaacctttctttgatagttcagctttgaaacactcttcttgtagaaactgcaagtggatatttggtcctctctgaggatttcgttggaaacgggataaaccgcacagaactaaacagaagaattctcagagccctcttcgtgatgtttgcattcaactcacagtgctgaacctttctttgatagtgcagctttgaaacactctttttgtagaaactgcaagtggatgtttggtcctctctgaggatttcgttggaaacgggataaaccgcacagaactaaaacagaagcattgtcagaaacttctttgtgatgattgcattcaactcacagagttgaaggttccttttcaaacagcagtttccaatcactctttctgtggaatctgcaagtggatatttgggcctctctgaggatttcgttggaaacgggataaaacgcacagaactaaaacagaagcattctgagaaacttctctgtgatgtttgtgttcaactcccagagtgtcacattgcttctcatagagtagttctgaaacatgcttttcgtagtgtctgcaaggggacatttggagcgctttcaggcctgtggtggaaaacgaattatggtcacataaaaactggacagaagccttctcagaaacttctctgtgatgattgcattcaactcacagagttgaaccctcctatggatagagcagtgttgaaactctctttttgtggaatctgcaagtggatatgtggacctctccgaagatgtctttggaaacgggactatcttcacataaaaactaaacagaagcattctcagaaacttcttggtgatgtttgcattcaaatcccagagttgaaccttcctttgatagttcaggtttgaaacactctttttgtaggatctgcaagtggatatttggaccactctgtggccttcgttcgaaacgggtacatcttcgcataaaatctagacagaagcattctcagaaaatactttgtgatgattgtgttgaactcacagagctgaacattcctttggatggagcaggtttgagacacactttttgtagaatctacaagtggatatttggacctctctgaggatttcgttggaaacgggataactgcacctaactaaacggaagcattctcagaaactgctttgtgatgattgcattcacctcacagagttgaacattcctattgatagagcagtttggaaacactcttgttgtggaatgtgcaagtggagatatggagcgctttgaggcctatggtagtaaagggaatagcttcatagaaaaactacacagatgcattctcaggaactttttggtgatgtttgtattcaactcccagagttgaactttcctttggaaagagcagctatgaaacactctttttctagaatctgcaagtggacgtttggagggctttgtggtttgtggtggaaaaggaaatatcttcacctaaatactagatagaagcattctcagaagcttctctgtgatgactgcattcaactcacggagttgaacactccttttgagagcgcagttttgaaactctctttctgtggcatctgcaaggggacatgtagacctctttgaagatttcgttggaaacagaatcatcttcacataaaaactatacagaagcagtctcagaatcttctttgtgatgtttgcattcaaatcccagagttgaactttcctttcaaagttcacgtttgaaactctctttttgcaggatctataagtggatatttggaccactctgtgtatttcgttcgaaacgggtatatcttcacatgacatctagacagaagctttctaagaaaattctttgggatgattgagtggaactcacagagctgaacattccttgcgatgtagcagtttagaaacacactttctgcagaatctgcaagtgcatatgtggacctctctgaggaattcgttggaaacgggataatttcagctgactaaacagaagcattctcagaaccttcttcgtgatgtctgcattcatctcacagtgtggaacctttctttgatagttcaggtttgaaacactctttttgtagaaactgcaaggggataattgcacttctttgaggcctaccgtagtaaaggaaataacttcctatagaaagaagaaagaagcattctcagaaccctcttcgtgatgtttgcattcaactcacagtgctgaacctttctttgatagttcagctttgaaacactcttcttgtagaaactgcaagtggatatttggtcctctctgaggatttcgttggaaacgggataaaccgcacagaactaaacagaagaattctcagagccctcttcgtgatgtttgcattcaactcacagtgctgaacctttctttgatagtgcagctttgaaacactctttttgtagaaactgcaagtggatatttggtcctctctgaggatttcgttggaaacgggataaaccgcacagaactaaaacagaagcattcacagaaaactcttggtgacgactgagtttaactcacagagctgaacattcctttggatggagcagtttcgaaacacactatttgtagaatctgcaagtggatatttgggcctctctgaagatttcgttggaatcgggataaaccgcacagaactaaaacagaagcattctgagaaactactttgtgatgattgcattcaagtcacagagctgaacattccctttgacagagcagtttggaaactctctttgtgtagaatctgcaagtggagatatggaatgctttgaggactatggtattaaaggaaatagcttcatagacaagctagacagtagcattctcagaaacttctttgtgatgcttgcattcaactcacagagttgaactttcctttcgagagagaagctttgaaacactctttttccagaatctgcaagtggacatttggagggctttgaggcctgtggtggaaaaggaattatcttcccgtaaaagctggatagaagcattgtcagaaacttctttgtgatgattgcattcaactcacagagttgaaggttccttttcaaacagcagtttccaatcactctttctgtggaatctgcaagtggatatttcgacctctttgaagatttcgttggaaacgggagaatcttcacagaaaagctaaacagaagcattctcagaaacttctctgtgatgtttgtgttcaactcccagaatttcacattgcttttcatagagtagttctgaaacatgcttttcgtagtgtctgcaagtggacatttggagcgctttcaggcctgtggtggaaaacgaattatggtcacagaaaaactggagagaagccttctcagaaacttctctgtgatgattgcattcaactcacagagttgaaccctcctatggatagagcagtgttgaaactctctttttgtggaatctgcaagtggatatgtggacctctccgaagatgtctttggaaacgggaatatcttcacataaaaactaaacagaagcattctcagaaacttcttggtgatgtttgcattcaaatcccagagttgaaccttcctttgatagttcaggtttgaaacactctttctgtaggatctgcaagtggctatttggaccactctgtggccttcgttcgaaacgggtatatcttcgcataaaatctagacagaagcattctcagaaaatactttgtgatgattgagtttaaatcacagagctgaccattcctttggatggagcaggtttgagacacactttttgtagaatctacaagtggatatttggacctctctgaggatttcgttggaaacgggataactgcacctaactaaacggaagcattctcagaaactgctttgtgatgattgcattcacctcacagagttgaacattcctattgatagagcagtttggaaacactcttgttgtggaatgtgcaagtggagatttggagcgctttgaggcctatggtagtaaagggaatagcttcatagaaaaactagacagatgcattctcaggaactttttggtgatgtttgtattcaactcccagagttgaactttcctttggaaagagcagctatgaaacactctttttctagaatctgcaagtggacgtttggagggctttgtggtttgtggtggaaaaggaaatatcttcacctaaatactagatagaagcattctcagaagcttctctgtgatgactgcattcaactcacggagttgaacactccttttgagagcgcagttttgaaactctctttctgtggcatccgcaaggggacatgtggacctctttgaagatttcgttggaaacggaatcatcttcacatcaaaactatacagaagcagtctcagaatcttctttgtgatgtttgcattcaaatcccagagttgaactttcctttcaaagttcacgtttgaaacactctttttgcaggatctacaagtggatatttggaccactctgtgtccttcgttcgaaacgggtatatcttcacacgacatctagacagaagctttctcagaaaattctttgggatgattgagtggaactcacagagctgaacattccttgcgatgtagcagtttagaaacacactttctgcagaatctgcaagtgcatatttggacctctctgaggaattcgttggaaacgggataatttcagctgactaaacagaagcattctcagaaccttcttcgtgatgtctgcattcaactcacagtgtggaacctttctttgatagttcaggtttgaaacactctttttgtagaaactgcaaggggataattgcacttctttgaggcctaccgtagtaaaggaaataacttcctatagaaagaagacagaagcattctcagaaccctcttcgtgatgtttgcattcaactcacagtgctgaacctttctttgatagttcagctttgaaacactcttcttgtagaaactgcaagtggatatttggtcctctctgaggatttcgttggaaacgggataaaccgcacagaactaaacagaagatttctcagagccctcttcgtgatgtttgcattcaactcacagtgctgaacctttctttgatagtgcagctttgaaacactctttttgtagaaactgcaagtggatatttggtcctctctgagcatttcgttggaaacgggataaaccgcacagaactaaacagaagcattcacagaaaactcttggtgacgactgagtttaactcacagagctgaacattcctttggatggagcagtttcgaaacacactatttgtagaatctgcaagtggatatttgggcctctctgaggatttcgttggaaacgggataaaacgcacagaactaaaacagaatcattctcagaaactactttgtgatgattgcattcaagtcacagagttgaacattccctttgacagagcagtttggaaactctctttgtgcagaatctgcaagtggagatatggaccgctttgaggcctatggtagtaaaggaaatagcttcatataaaagctagacagtagcattctcagaaacttctttgtgatgcttgcattcaactcacagagttgaactttcctttcgagagagaagctttgaaacactctttttccagaatctgcaagtggacatttggagggctttgaggcctgtggtggaaacgaattatcttcccgtaaaagctagatagaagccttctcagaaacttctctgtgatgattgcattcaactcacagagttgaaggttccttttcaaagagcagtttccaatcactctttctgtggaatctgcaagtggatatttggacctattttgaagatttcgttggaaacgggagaatcttcacaggaaagctaaacagaagcattctcagaaacttctctgtgatgtttgtgttcaactcccagagtttcacattgcttttcatagagtagttctgaaacatgcttttcgtagtgtctgcaagtggacatttggagcgctttcaggcctgtggtggaaaacgaattatggtcacataaaaactggagagaagccttctcagaaacttctctgtgatgattgcattcaactcacagagttgaaccctcctatggatagagcagtgttgaaactctctttttgtggaatctgcaagtggatatgtggacctctccgaagatgtctttggaaacgggaatatcttcacataaaaactaaacagaagcattctcagaaacttcttggtgatgtttgcattcaaatcccagagttgaaccttcctttgatagttcaggtttgaaacactctttttgtaggatctgcaagtggctatttggaccactctgtggccttcgttcgaaacgggtatatcttcgcataaaatctagacagaagcattctcagaaaatactttgtgatgattgagttgaactcacagagctgaacattcctttggatggagcaggtttgagacacactttttgtagaatctacaagtggatatttggacctctctgaggatttcgttggaaacgcgataactgcacctaactaaacggaagccttctcagaaactgctttgtgatgattgcattcacttcacagagttgaacattcctattgatagagcagtttggaaacactcttgttgtggaatgtgcaagtggagatttggagcgctttgaggcctatggtagtaaagggaatagcttcatagaaaaactagacagatgcattctcaggaactttttggtgatgtttgtattcaactcccagagttgaactttcctttggaaagagcagctatgaaacactctttttctagaatctgcaagtggacgtttggagggctttgtggtttgtggtggaaaaggaaatatcttcacctaaatactagatagaagcattctcagaagcttctctgtgatgactgcattcaactcacggagttgaacactccttttgagagcgcagttttgaaactctctttctgtggcatctgcaaggggacatgtagacctctttgaagatttcgttggaaacggaatcatcttcacataaaaactacacagaagcagtctcagaatcttctttgtgatgtttgcattcaaatccccgagttgaactttcctttcaaagttcacgtttgaaacactctttttgcaggatctacaagtggatatttggaccactctgtgtccttcgttcgaaacgggtatatcttcacatgacatctagacagaagctttctcagaaaattgtttgggatgattgacttgaactcacagcagctgagcattccttgcgatgtagcagtttagaaacacactttctgcagaatctgcaagtgcatatttggacctctctgaggaattcgttggaaacgggataatttcagctgactaaacagaagcattctcagaaccttcttcgtgatgtctgcattcaactcacagtgtggaacctttctttgatagttcaggtttgaaacactctttttgtagaaactgcaaggggataattgcacttctttgaggcctaccgtagtaaaggaaataacttcctatagaaagaagacacaagcattctcagaaccctcttcgtgatgtttgcattcaactcacagtgctgaacctttctttgatagttcagctttgaaacactctttttgtagaaactgcaagtggatatttggtcctctctgaggaattcgttggaaacgggataaactgcacagaactaaacagaagcattctcagaaccttcttcgtgatgtttgcattcaactcacagtgttgaacctttctttgatagttcaggtttgaaacggtctttctgtagaaactgcaagtagatatttggacctctctgaggatttcgttggaaaagggataacccgcacagaactaaaacagaagcattcacagaaaactcttggtgacgactgagtttaactcacagagctgaacattcctttggatggagcagtttcgaaacacactatttgtagaatgtgcaagtggatatttaggcctctctgaggatttcgttggaaacgggataaaccgcacagaactaaacagaagcattctcagaaactactttgtgatgattgcattcaagtcacagagttgaacattccctttgacagagcagtttggaaactctctttgtgtagaatctgcaagtggagatatggaccgctttgaggcctatggtagtaaaggaaatagcttcatataaaagctagacagtagcattctcagaaacttctttgtgatgcttgcattcaactcacagagttgaactttcctttcgagagagaagctttgaaacactctttttccagaatctgcaagtggacatttggagggctttgaggcctgtggtggaaaaggaattaacttcccgtaaaagctagatagaagcattgtcagaaacttctttgtgatgattgcattcaagtcacagagttgaaggttccttttcaaagagcagtttccaatcactctttctgtggaatctgcaagtggatatttggacctctttgaagatttcgttggaaacgggagaatcttcacagaaaagctaaacagaagcattctcagaaacttctctgtgatgtttgtgttcaactcccagagtttcacgttgcttttcatagagtagttctgaaacatgcttttcgtagtgtctgcaagtggacatttggagcgctttcaggcctgtggtggaaaacgaattatggtcacataaaaactggagagaagccttctcagaaacttctctgtgatgattgcattcaactcacagagttgaaccctcctatggatagagcagtgttgaaactctctttttgtggaatctgcaagtggatatgtggacctctccgaagatgtctttggaaacgggaatatcttcacataaaaactaaacagaagcattctcagaaacttcttggtgatgtttgcattcaaatcccagagttgaaccttcctttgatagttcaggtttgaaacactctttctgtaggatctgcaagtggctatttggaccactctgtggccttcgttcgaaacgggtatatcttcgcataaaatctagacagaagcattctcagaaaatactttgtgatgattgagtttaaatcacagagctgaccattcctttggatggagcaggtttgagacacactttttgtagaatctacaagtggatatttggacctctctgaggatttcgttggaaacgggataactgcacctaactaaacggaagcattctcagaaactgctttgtgatgattgcattcacctcacagagttgaacattcctattgatagagcagtttggaaacactcttgttgtggaatgtgcaagtggagatttggagcgctttgaggcctatggtagtaaagggaatagcttcatagaaaaactagacagatgcattctcaggaactttttggtgatgtttgtattcaactcccagagttgaactttcctttggaaagagcagctatgaaacactctttttctagaatctgcaagtggacgtttggagggctttgtggtttgtggtggaaaaggaaatatcttcacctaaatactagatagaggcattctcagaagcttctctgtgatgactgcattcaactcacggaattgaacactccttttgagagcgcagttttgaaactctctttctgtggcatctgcaagcggacatgtagacctctttgaagatttcgttggaaacggaatcatcttcacataaaaactatacagaagcagtctcagaatcttctttgtgatgtttgcattcaaatcccagagttgaactttcctttcaaagttcacgtttgaaacactctttttgcaggatctacaagtggatatttggaccaatctgtgtccttcgttcgaaacgggtatatcttcacatgacatctagacagaagctttctcagaaaattctttgggatgattgagtggaactcacagagctgaacattccttgcgatgtagcagtttagaaacacactttctgcagaatctgcaagtgcatatttggacctctctgaggaattcgttggaaacgggataatttcagctgactaaacagaagcattctcagaaccttcttcgtgatgtctgcattcaactcacagtgtggaacctttctttgatagttcaggtttgaatcactctttttgtagaaactgcaaggggataattgcacttctttgaggcctaccgtagtaaaggaaataacttcctataaaaagaagacagaagcattctcagaaccctcttcgtgatgtttgcattcaactcacggtgctgaatctttctttgatagttcagctttgaaacactctttttgtagaaactgcaagtggatatttggtcctctctgaggatttcgttggaaacgggataaaccgcacagaactaaacagaagcattctcagaaccttcttcgtgatgtttgcattcaactcacagtgttgaacctttctttgatagttcaggtttgaaacggtctttctgtagaaactgcaagtagatatttggacctctctgaggatttcgttggaaacgggataaaccgcacagaactacaacagaagcattcacagaaaactcttggtgacgactgagtttaactcacagagctgaacattcctttggatggagcagtttcgaaacacactatttgtagaatctgcaagtggatatttgggcctctctgaggatttcgttggaaacgggataaaccgcacagaagtaaacagaagcattctcagaaactactttgtgatgattgcattcaagtcacagagttgaacattccctttgacagagcagtttggaaactctctttgtgtagaatctgcaagtggagatatggaccgctttgaggcctatggtagtaaaggaaatagcttcatataaaagctagacagtagcattctcagaaacttctttgtgatgcttgcattcaactcacagagttgaactttcctttcgagagagaagctttgaaacactctttttccagaatctgcaagtggacatttggagggctttgaggcctgtggtggaaaaggaattatcttcccgtaaaagctagatagaagcattgtcagaaacttctttgtgatgattgcattcaactcacagagttgaaggttccttttcaaacagcagtttccaatcactctttctgtggaatctgcaagtggatatttgggcctctctgaggatttcgttggaaacgggataaaacgcacagaactaaaacagaagcattctcagaaacttctctgtgatgtttgtgttcaactcccagagtttcacattgcttctcatagagtagttctgaaacatgcttttcatactgtctgcaagtggacatttggagcgctttcaggcctgtggtggaaaacgaattatggtcacataaaaactggagagaagccttctcagaaacttctctgtgatgattgcattcaactcacagagttgaaccctcctatggatagagcagtgttgaaactctctttttgtggaacctgcaagtggatatgtggacctctccgaagatgtctttggaaacgggaatatcttcacataaaaactaaacagaagcattctcagaaacttcttggtgatgtttgcattcaaatcccagagttgaaccttcctttgatagttcaggtttgaaacactctttctgtaggatctgcaagtggctatttggaccactctgtggccttcgttcgaaacgggtatatcttcgcataaaatctagacagaagcattctcagaaaatactttgtgatgattgagtttaactcacagagctgaacattcctttggatggagcaggtttgagacacactttttgtaaaatctacaagtggatatttggacctctctgaggatttcgttggaaacgggataactgcacctaactaaacggaagcattctcagaaactgctttgtgatgattgcattcacctcacagagttgaacattcctattgatagagcagtttggaaacactcttgttgtggaatgtgcaagtggagatttggagcgctttgaggcctatggtagtaaagggaatagcttcatagaaaaactagacagatgcattctcaggaactttttggtgatgtttgtattcaactcccagagttgaactttcctttggaaagagcagctatgaaacactctttttctagaatctgcaagtggacgtttggagggctttgtggtttgtggtggaaaaggaaatatcttcacctaaatactagatagaagcattctcagaagcttctctgtgatgactgcattcaactcacggagttgaacactccttttgagagcgcagttttgaaactctctttctgtggcatctgcaagaggacatgtagacctctttgaagatttcgttggaaacggaatcatcttcacataaaaactatacagaagcagtctcagaatcttctttgtgatgtttgcattcaaatcccagagttgaactttcctttcaaagttcacgtttgaaacactctttttgcaggatcttcaagtggatatttggaccactctgtgtccttcgttcgaaacgggtatatcttcacatgacatctagacagaagctttctcagaaaattctttgggatgattgagttgaactcacagagctgagcattccttgcgatgtagcagtttagaaacacactttctgcagaatctgcaagtgcatatttggacctctgtgaggaattcgttggaaacgggataatttcagctgactaaacagaagcattctcagaaccttcttcgtgatgtctgcattcaactcacagtgtggaacctttctttgatagttcaggtttgaaacactctttttgtagaaactgcaaggggataattgcacttctttgaggcctaccgtagtaaaggaaataacttcctatagaaagaagacagaagcattctcagaaccctcttcgtgatgtttgcattcaactcacagtgctgaacctttctttgatagttcagctttgaaacactcttcttgtagaaactgcaagtggatatttggtcctctctgaggatttcgttggaaacgggataaaccgcacagaactaaacagaagaattctcagagccctcttcgtgatgtttgcattcaactcacagtgctgaacctttctttgatagtgcagctttgaaacactctttttgtagaaactgcaagtggatgtttggtcctctctgaggatttcgttggaaacggcataaaccgcacagaactaaaacagaagcattcacagaaaactcttggtgacgactgagtttaactcacagagctgaacaatcctttggatggagcagtttcgaaacacactatttgtagaatctgcaagtggatatttgggcctctctgaggatttcgttggaaacgggataaaacgcacagaactaaaacagaagcattctcagaaactactttgtgatgattgcattcaagccacagagctgaacattccctttgacagagcagtttggaaactctctttgtgtagaatctgcaagtggagatatggtatgctttgaggactatggtagtaaaggaaatagcttcatataaaagctagacagtagcatcctcagaaacttctttgtgatgcttgcattcaactcacagagttgaactttcctttcgagagagaagctttgaaacactctttttccagaatctgcaagtggacatttggagggctttgaggcctgtggtggaaaaggaattatcttcccataaaagctagatagaagcattgtcagaaacttctttgtgatgattgcattcaactcacagagttgaaggttccttttcaaacagcagtttccaatcactctttctgtggaatctgcaagtggatatttgggcctctctgaggatttcgttggaaacgggataaaacgcacagaactaaaacagaagcattctcagaaacttctctgtgatgtttgtgttcaactcccagagtttcacattgcttttcatagagtagttctgaaacatgctttccgttttgtctgcaagtggacatttggagagctttcaggccagtggtggaaaacgaattatggtcacataaaaactggagagaagccttctcagaaacttctctgtgatgattgcattcaactcacagagttgaaccctcctatggatagagcagtgttgaaactctctttttgtggaatctgcaagtggatatgtggacctctccgaagatgtctttggaaacgggaatatcttcacataaaaactaaacagaagcattctcagaaacttcttggtgatgtttgcattcaaatcccagagttgaaccttcctttgatagttcaggtttgaaacactctttttgtaggatctgcaagtggatatttggaccactctgtggccttcgttcgaaacgggtatatcttcgcataaaatctagacagaagcattctcagaaaatactttgtgatgattgagtttaactcacagagctgaacattcctttggatggagcaggtttgagacacactttttgtagaatctacaagtggatatttggacctctctgaggatttcgttggaaacgcgataactgcacctaactaaacggaagcattctcagaaactgctttgtgatgattgcattcacctcacagagttgaacattcctattgatagagcagtttggaaacactcttgttgtggaatgtgcaagtggagatttggagcgctttgaggcctatggtagtaaagggaatagcttcatagaaaaactagacagatgcattctcaggaactttttggtgatgtttgtattcaactcccagagttgaactttcctttggaaagagcagctatgaaacactctttttctagaatctgcaagtggacgtttggagggctttgtggtttgtggtggaaaaggaaatatcttcacctaaatactagatagaagcattctcagaagcttctctgtgatgactgcattcaactcacggagttgaacactccttttgagagtgcagttttgaaactctctttctgtgggatctgcaaggggacatgtagacctctctgaagatttcgttggaaacggaatcatcttcacataaaaactatacagaagcagtctcagaatcttctttgtgatgtttgcattcaaatcccagagttgaactttcctttcaaagttcacgtttgaaacactctttttgcaggatctacaagtggatatttggaccactctgtgtccttcgttcgaaacgggtatatcttcacatgacatctagacagaagctttctcagaaaattctttgcgatgattgagttgaactcacagagctgaacattccttgcgatgtagcagtttagaaacacactttctgcagaatctgcaagtgcatatttggacctctctgaggaattcgttggaaacgggataatttcagctgactaaacagaagcattctcagaaccttcttcgtgatgtctgcattcaactcacagtgtggaacctttctttgatagttcaggtttgaaacactctttttgtagaaactgcaaggggataattgcacttctttgaggcctaccgtagtaaaggaaataacttcctatagaaagaagacagaagcattctcagaaccctcttcgtgatgtttgcattcaactcacagtgctgaacctttctttgatagttcagctttgaaacactctttttgtagaaactgcaagtggatacttgttcctctatgaggatttcgttggaaacgggataaacctcacagaactaaacagaagcattctcagaaccttcttcgtgatgtttgcattcaactcacggtgttgaacctttctttgatagttcaggtttgaaacggtctttctgtagaaactgcaagtagatatttggacctctctgaggatttcgttggaaacggggtaacccgcacagaactaaaacagaagcattcacagaaaactcttggtgacgactgagtttaactcacagagctgaacattcctttggatggagcagttttgaaacacactatttgtagaatgtgcaagtggatatttgggcctctctgaggatttcgttggaaacgggataaacggcacagaactaaacagaaccattgtcagaaactactttgtgatgattgcattcaagtcacagagttcaacattccctttgacagagcagtttggaaactctctttgtgtagaatctgcaagtggagatatggaccgctttcaggcctatggtagtaaaggaaatagcttcatataaaagctagacagtagcattctcagaaacttctttgtgatgcttgcattcaactcacagagttgaactatcctttcgagagagaagctttgaaatactctttttccagaatctgcaagtggacatttggagggctttgaggcctgtggtggaaaaggaattatcttcctgtaaaagctagatagaagcattgtcagaaacttctttgtgatgattgcattcaactcacagagttgaaggttccttttcaaagagcagtttccaatcactctttctgtggaatctgcaagtggatatttggacctctttgaagatttcgttggaaacgggagaatcttcacagaaaagctaaacagaagcattctcagaaacttctctgtgatgtttgtgttcaacttccagagtttcacattgcttttcatagagtagttctgaaacatgcttttcgtagtgtctgcaagtggacatttggagcgctttcaggcctgtggtggaaaacgaattatggtcacataaaaactggagagaagccttctcagaaacttctctgtgatgattgcattcaactcacagagttgaaccctcctatggatagagcagtgttgaaactctctttttgtggaatctgcaagtggatatgtggacctctccgaagatgtctttggaaacgggaatatcttcacataaaaactaaacagaagcattctcagaaacttcttggtgatgtttgcattcaaatcccagagttgaaccttcctttgatagttcaggtttgaaacactctttttgtaggatctgcaagtggatatttggaccacactgtggcctttgttcgaaacgggtacatcttcgcataaaatctagacagaagcattctcagaaaatactttgtgatgattgagtttaaatcacagagctgaccattcctttggatggagcaggtttgagacacactttttgtagaatctacaagtggatatttggacctctctgaggatttcgttggaaacgggataactgcacctaactaaacggaagcattctcagaaactgctttgtgatgattgcattcacctcacagagttgaacattcctattgatagaggagtttggaaacactcctgttgtggaatgtgcaagtggagatttggagcgctttgaggcctatggtagtaaagggaataacttcatagaaaaactagacagatgcattctcaggaactttttggtgatgtttgtattcaactcccagagttgaactttcctttggaaagagcagctatgaaacactctttttctagaatctgcaagtggacgtttggagggctttgtggtttgtggtggaaaaggaaatatcttcacctaaatactacatagaagcattctcagaagcttctctgtgatgactgcattcaactcacggagttgaacactccttttgagagcgcagttttgaaactctctttctgtggcatctgcaaggggacatgtagacctctctgaagatttcgctggaaacggaatcatcttcacataaaaactatacagaagcagtctcagaatcttctttgtgatgtttgcattcaaatcccagagttgaactttcctttcaaagttcacgtttgaaacactctttttgcaggatctacaagtggatatttggaccactctgtgtccttcgttcgaaacgggtatatcttcacatgacatctagacagaagctttctcagaaaattctttgggatgattgagttgaactcacagagctgaacattccttgcgatgtagcagtttagaaacacagtttctgcagaatctgcaagtgcatatttggacctctctgaggaattcgttggaaacgggataatttcagctgactaaacagaagcattctcagaaccttcttcgtgatgtctgcattcaactcacagtgtggaacctttctttgatagttcaggtttgaaacactctttttgtagaaactgcaaggggataactgcacttgtttgaggcctatcgtagtaaaggaaataacttcctataaaaagaagacagaagcattctcagaaccctcttcgtgatgtttgcattcaactcacagtgctgaacctttctttgatagttcagctttgaaacactcttcttgtagaaactgcaagtggatatttggtcctctctgaggatttcgttggaaacgggataaaccgcacagaactaaacagaagaattctcagagccctcttcgtgatgtttgcattcaactcacagtgctgaacctttctttgatagtgcagctttgaaacactctttttgtagaaactgcaagtggatgtttggtcctctctgaggatttcgttggaaacgggataaaccgcacagaactaaaacagaagcattgtcagaaacttctttgtgatgattgcattcaactcacagagttgaaggttccttttcaaacagcagtttccaatcactctttctgtggaatctgcaagtggatatttgggcctctctgaggatttcgttggaaacgggataaaacgcacagaactaaaacagaagcattctcagaaacttctctgtgatgtttgtgttcaactcccagagtttcacgttgcttttcatagagtagttctgaaacatgcttttcgtagtgtctgcaagtggacatttggagcgctttcaggcctgtggtggaaaacgaattatggtcacataaaaactggagagaagccttctcagaaacttctctgtgatgattgcattcaactcacagagttgaaccctcctatggatagagcagtgttgaaactctctttttgtggaatctgcaagtggatatgtggacctctccgaagatgtctttggaaacgggaatatcttcacataaaaactaaacagaagcattctcagaaacttcttggtgatgtttgcattcaaatcccagagttgaaccttcctgtgatagttcaggtttgaaacactctttttgtaggatctgcaagtggatatttggaccactctgtggccttcgttcgaaacgggtacatcttcacataaaatctagacagaagcattctcagaaaatactttgtgatgattgagtttaaatcacagagctgaccattcctttggatggagcaggtttgagacacactttttgtagaatctacaagtggatatttggacctctctgaggatttcgttggaaacgggataactgcacctaactaaacggaagcattctcagaaactgctttgtgatgattgcattcacctcacagagttgaacattcctattgatagagcagtttggaaacactcttgttgtggaatgtgcaagtggagatttggagcgctttgaggcctgtggtagtaaagggaatagcttcatagaaaaactagacagatgcattctaaggaactttttggtgatgtttgtattcaactcccagagttgaactttcctttggaaagagcagctatgaaacactctttttctagaatctgcaagtggacgtttggagggctttgtggtttgtggtggaaaaggaaatatcttcacctaaatactagatagaagcattctcagaagcttctctgagatgactgcattcaactcacggagttgaacactccttttgagagcgcagttttgaaactctccttctgtggcatctgcaaggggacatgtagacctctttgaagatttcgttggaaacggaatcatcttcacataaaatctatacagaagcagtctcagaatcttctttgtgatgtttgcattcaaatcccagaattgaactttcctttcaaagttcacgtttgaaacactctttttgcaggatctacaagtggatatttggaccactctgtgtccttcgttcgaaacgggtatatcttcacatgacatctagacagaagctttctcagaaaattctttgggatgattgagttgaactcacagagctgaacattccttgcgatggagcagtttagaaacacactttctgcagaatctgcaagtgcatatttggacctctctgaggaattcgttggaaacgggataatttcagctgactaaacagaagcattctcagaaccttcttcgtgatgtctgcattcaactcacagtgtggaacctttctttgatagttcaggtttgaaacactctttttgtagaaactgcaaggggataattgcacttctttgaggcctatcgtagtaaaggaaataacttcctataaaaagaagacagaagcattctcagaaccctcttcgtgatgtttgcattcaactcacagtgctgaacctttctttgatagttcagctttgaaacactcttcttgtagaaactgcaagtggatatttggtcctctctgaggatttcgttggaaacgggataaaccgcacagaactaaacagaagcattctcagaaccttcttcgtgatgtttgcattcaactcacagtgttgaacctttctttgatagttcaggtttgaaacggtctttctgtagaaactgcaagtagatatttggacctctctgaggatttcgttggaaacgggataacccgcacagaactaaaacagaagcattcacagaaaactcttggtgacgactgagtttaactcacagagctgaacattcctttggatggagcagtttcgaaacacactatttgtagaatgtgcaagtggatatttaggcctctctgaggatttcgttggaaacgggataaaccgcacagaactaaacagaagcattctcagaaactactttgtgatgattgcattcaagtcacagagttgaacattccctttgacagagcagtttggaaactctctttgtgtagaatctgcaagtggagatatggaccgctttgaggcctatggtagtaaaggaaatagcttcatataaaagctagacagtagcattctcagaaacttctttgtgatgcttgcattcaactcacagagttgaactttcccttcgagagagaagctttgaaacactctttttccagaatctgcaagtggacatttggagggctttgaggcctgtggtggaaaaggaattatcttcccgtaaaagctagatagaagcattgtcagaaacttctttgtgatgattgcattcaagtcacagagttgaaggttccttttcaaagagcagtttccaatcactctttctgtggaatctgcaagtggatatttggacctctttgaagatttcgttggaaacgggagaatcttcacagaaaagctaaacagaagcattctcagaaacttctctgtgatgtttgtgttcaactcccagagtttcacgttgcttttcatagagtagttctgaaacatgcttttcgtagtgtctgcaagtggacatttggagcgctttcaggcctgtggtggaaaacgaattatggtcacataaaaactggagagaagccttctcagaaacttctctgtgatgattgcattcaactcacagagttgaaccctcctatggatagagcagtgttgaaactctctttttgtggaatctgcaagcggatatgtggacctctccgaagatgtctttggaaacgggaatatcttcacataaaaactaaacagaagcattctcagaaacttcttggtgatgtttgcattcaaatcccagagttgaaccttcctttgatagttcaggtttgaaacactctttttgtaggatctgcaagtggatatttggaccactctgtggccttcgttcgaaacgggtacatcttcgcaaaaaatctagacagaagcattctcagaaaatactttgtgatgattgagttgaactcacagagctgaacattcctttggatggagcaggtttgagacacactttttgtagaatctacaagtggatatttggacctctctgaggatttcgttggaaacgggataactgcacctaactaaacggaagcattctcagaaactgctttgtgatgattgcattcacctcacagagttgaacattcctattgatagagcagtttggaaacactcttgttgtggaatgtgcaagtggagatttggagcgctttgaggcctatggtagtaaagggaatagcttcatagaaaaactagacagatgcattctcaggaactttttggtgatgtttgtattcaactcccagagttgaactttcctttggaaagagcagctatgaaacactctttttctagaatctgcaagtggacgtttggagggctttgtggtttgtggtggaaaaggaaatatcttcacctaaatactagatagaagcattctcagaagcttctctgtgatgactgcattcaactcacggagttgaacactccttttgagagcgcagttttgaaactctctttctgtggcatctgcaaggggacatgtagacctctttgaagatttcgttggaaacggaatcatcttcacataaaaactatacagaagcagtctcagaatcttctttgtgatgtttgcattcaaatcccagagttgaactttcctttccaagttcacgtttgaaacactctttttgcaggatctacaagtggatatttggaccactctgtgtccttcgttcgaaacgggtatatcttcacatgacatctagacagaagctttctcagaaaattctttgggatgattgagtggaactcacagagctgaacattccttgcgatgtagcagtttagaaacacactttctgcagaatctgcaagtgcatatttggacctctctgaggaattcgttggaaacgggataatttcagctgactaaacagaagcattctcagaaccttcttcgtgatgtctgcattcaactcacagtgtggaacctttctttgatagttcaggtttgaaacactctttttgtagaaactgcaaggggataatggcacttctttgaggcctaccgtagtaaaggaaataacttcctatagaaagaagacagaagaattctcagagccctcttcgtgatgtttgcattcaactcacagtgctgaacctttctttgatagtgcagctttgaaacactctttttgtagaaactgcaagtggatgtttggtcctctctgaggatttcgttggaaacgggataaaccgcacagaactaaaacagaagcattctcagaaccctcttcgtgatgtctgcattcaactcacagtgctgaacctttctttgatagttcagctttgaaacactctttttgtagaaactgcaaatggatatttggtcctctctgaggatttcgttggaaaagggataaactgcacagaactaaacagaagcattcacagaaaactcttggtgacgactgagtttaactcacagagctgaacattcctttggatggagcagtttcaaaacacactatttgtagaatgtgcaagtggatatgtgggcctctctgaggatttcgttggaaacgggataaaccgcacagaactaaaacagaagcattctcagaaactactttgttatgattgcattcaagtcacagagttgaacattccctttgacagagcagtttggaaactctctttgtgtagaatctgcaagtggagatatggaccgctttgaggcctatggtagtaaaggaaatagcttcatataaaagctagacagtagcattctcagaaacttctttgtgatgcttgcattcaactcacagagttgaactatcctttcgagagagaagctttgaaatactctttttccagaatctgcaagtggacatttggagggctttgaggcctgtggtggaaaaggaattatcttcctgtaaaagctagatagaagcattgtcagaaacttctttgtgatgattgcattcaactcacagagttgaaggttccttttcaaagagcagtttccaatcactctttctgtggaatctgcaagtggatatttggacctctttgaagatttcgttggaaacgggagaatcttcacagaaaagctaaacagaagcattctcagaaacttctctgtgatgtttgtgttcaacttccagagtttcacattgcttttcatagagtagttctgaaacatgcttttcgtagtgtctgcaagtggacatttggagcgctttcaggcctgtggtggaaaacgaattatggtcacataaaaactggagagaagccttctcagaaacttctctgtgatgattgcattcaactcacagagttgaaccctcctatggatagagcagtgttgaaactctctttttgtggaatctgcaagtggatacgtggacctctccgaagatgtctttggaaacgggaatatcttcacataaaaactaaacagaagcattctcagaaacatcttggtgatgtttgcattcaaatcccagagttgaaccttcctttgatagttcaggtttgaaacactctttttgtaggatctgcaagtggatatttggaccactctgtggccttcgttcgaaacagggtacatcttcgcataaaatctagacagaagcattctcagaaaatactttgtgatgattgagtttaactcacagagctgaacattcctttggatggagcaggtttgagacacactttttgtagaatctagaagtggatatttggacctctctgaggatttcgttggaaacgggataactgcacctaactaaacggaagcattctcagaaactgctttgtgatgattgcattcacctcacagagttgaacattcctattgatagagcagtttggaaacactcttgttgtggaatgtgcaagtggagatttggagcgctttgaggtctatggtagtaaagggaatagcttcatagaaaaactagacagatgcattctcaggaactttttggtgatgtttgtattcaactcccagagttgaactttcctttggaaagagcagctatgaaacactctttttctagaatctgcaagtggacgtttggagggctttgtggtttgtggtggaaaaggaaatatcttcacctaaatactaggatagaagcattctcagaagcttctctgtgatgactgcattcaactcacagagttgaacactccttttgagagcgcagttttgaaactctctttctgtggcatctgcaaggggacatgtagacctcttggaagatttcgttggaaacggaatcatcttcacataaaaactatacagaagcagtctcagaatcttctttgtgatgtttgcattcaaatcccagagttgaactttcctttcaaagttcacgtttgaaacactctttttgcaggatctacaagtggatatttggaccactctgtgtccttcgttcgaaacgggtatatcttcacacgacatctagacagaagctttctcagaaaattctttgggatgattgagtggaactcacagagctgaacattccttgcgatgtagcagtttagaaacacactttctgcagaatctgcaagtgcatatttggacctctctgaggaattcgttggaaacgggataatttcagctgactaaacagaagcattctcagaaccttcttcttgatgtctgcattcaactcacagtgtggaaactttctttgatagttcaggtttgaaacactctttttgtagaaacttcaaggggataattgcacttctttgaggcctaccgtagtaaaggaaataacttcctataaaaagaagacagaagaattctcagagccctcttcgtgatgtttgcattcaactcacagtgctgaacctttctttgatagtgcagctttgaaacactctttttgtagaaactgcaagtggatatttggtcctctctgaggatttcgttggaaacgggataaaccgcacagaactaaacagaagcattctcagaaccttcttcgtgatgtttgcattcaactcacagtgttgaacctttctttgatagttcaggtttcaaacggtctttctgtagaaactgcaagtagatatttggacctctctgaggatttcgttggaaacgggataacccgcacagaactaaaacagaagcattcacagaaaactcttggtgacgactgagtttaactcacagagctgaacattcctttggatggagcagtttcaaaacacactatttgtagaatctgcaagtggatatgtgggcctctctgaggatttcgttggaaacgggataaaccgcacagaactaaaacagaagcattctcagaaactactttgtgatgattgcattcaagtcacagagttgaacattccctttgacagagcagtttggaaactctctttgtgtagaatctgcaagtggagatatggaccgctttgaggcctatggtagtaaaggaaatagcttcatataaaagctagacagtagcattctcagaaacttctttgtgatgcttgcattcaactcacagagttgaactttcctttcgagagagaagctttgaaacactctttttccagaatctgcaagtggacatttggagggctttgaggcctgtggtggaaaaggaattatcttcccgtaaaagctagatagaagcattctcagaaacttctttgtgatgattgcattcaactcacagagttgaaggttccttttcaaacagcagtttccaatcactctttctgtggaatctgcaagtggatatttgggcctctctgaggatttcgttggaaacgggataaaacgcacagaactcaaacagaagcattctcagaaacttctctctgatgtttgtgttcaactcccagagtttcacgttgcttttcatagagtagttctgaaacatgcttttcgtagtgtctgcaagtggacatttggagcgctttcaggcctgtggtggaaaacgaattatggtcacataaaaactggagagaagccttctcagaaacttctctgtgatgattgcattcaactcacagagttgaaccctcctatggatagagcagtgttgaaactctctttttgtggaatctgcaagcggatatgtggacctctccgaagatgtctttggcaacgggaatatcttcacataaaaactaaacagaagcattctcagaaacttcttggtgatgtttgcattcaaatcccagagttgaaccttcctttgagagttcaggtttgaaacactctttttgtaggatctgcaagtggatatttggaccactctgtggccttcgttcgaaacgggtacatcttcgcataaaatctagacagaagcattctcagaaaatactttgtgatgattgagtttaaatcacagagctgaccattcctttggatggagcaggtttgagacacactttttgtagaatctacaagtggatatttggacctctctgaggatttcgttggaaacgggataactgcacctaactaaacggaagcattctcagaaactgctttgtgatgattgcattcacctcacagagttgaacattcctattgatagagcagtttggaaacactcttgttgtggaatgtgcaagtggagatttggagcgctttgaggtctatggtagtaaagggaatagcttcatagaaaaactagacagatgcattctcaggaactttttggtgatgtttgtattcaactcccagagttgaactttcctttggaaagagcagctatgaaacactctttttctagaatctgcaagtggacgtttggagggctttgtggtttgtggtggaaaaggaaatatcttcacctaaatactagatagaagcattctcagaagcttctctgtgatgactgcattcaactcacggagttgaacactccttttgagagcgcagttttgaaactctctttctgtggcatctgcaaggggacatgtagacctctttgaagatttcgttggaaacggaatcatcttcgcataaaaactatacagaagcagtctcagaatcttctttgtgatgtttgcattcaaatcccagagttgaacttccctttcaaagttcacgtttgaaacactctttttgcaggatctacaagtggatatttggaccactctgtgtccttcgttcgaaacgggtatatcttcacatgacatctagacagaagctttctcagaaaattctttgggatgattgagtggaactcacagagctgaacattccttgcgatgtagcagtttagaaacacactttctgcagaatctgcaagtgcatatttggacctctctgaggaattcgttggaaacgggataatttcagctgactaaacagaagcattctcagaaccttcttcgtgatgtctgcattcaactcacagtgtggaacctttctttgatagttcaggtttgaaacactctttttgtagaaactgcaaggggataattgcacttctttgaggcctaccgtagtaaaggaaataacttcctatagaaagaagacagaagcattctcagaaccctcttcgtgatgtttgcattcaactcacagtgctgaacctttctttgatagttcagctttgaaacactctttttgtagaaactgcaagtggatatttggtcctctctgaggatttcgttggaaacgggataaaccgcacagaactaaacagaagcattctcagaaccttcttcgtgatgtttgcattcaactcacagtgttgaacctttctttgatagttcaggtttgaaacggtctttctgtagaaactgcaagtagatatttggacctctctgaggatttcgttggaaacgggataaaccgcacagaactaaaacagaagcattcacagaaaactcttggtgacgactgagtttaactcacagagctgaacattcctttggatggagcagtttcgaaacacactatttgtagaatctgcaagtggatatttgggcctctctgaggatttcgttggaaacgggataaaccgcacagaactaaaacagaagcattctcagaaactactttgtgatgattgcattcaagtcacagagttgaacattccctttgacagagcagtttggaaactctctttgtgtagaatctgcaagtggagatatggaccgctttgaggcctatggtagtaaaggaaatagcttcatataaaagctagacagtagcattctcagaaacttctttgtgatgcttgcattcaactcacagagttgaactttcctttcgagagagaagctttgaaacactatttttccagaatctgcaagtggacatttggagggctttgaggcctgtggtggaaaaggaattatcttcccgtaaaagctagatagaagcattgtcagaaacttctttgtgatgattgcattcaactcacagagttgaaggttccttttcaaacagcagtttccaaacactctttctgtggaatctgcaagtggatatttggacctctttgaagatttcgttggaaacgggagaatcttcacagaaaagctaaacggaagcaatctcagaaacttctctgtgatgtttgtgttcaactcccagagtttcacattgcttctcatagagtagttctgaaacatgcttttcgtagtgtctgcaagtggacatttggagcgctttcaggcctgtggtggaaaacgaattatggtcacataaaaactggagagaagccttctcagaaacttctctgtgatgattgcattcaactcacagagttgaaccctcctatggatagagcagtgttgaaactctctttttgtggaatctgcaagcggatatgtggacctctccgaagatgtctttggaaacgggaatatcttcacataaaaactaaacagaagcattctcagaaacttcttggtgatgtttgcattcaaatcccagagttgaaccttcctttgatagttcaggtttgaaacactctttctgtaggatctgcaagtggctatttggaccactctgtggccttcgttcgaaacgggtatatcttcgcataaaatctagacagaagcattctcagaaaatactttgtgatgattgagttgaactcacagagctgaacattcctttggatggagcaggtttgagacacactttttgtagaatctacaagtggatatttggacctctctgaggatttcgttggaaacgggataactgcacctaactaaacggaagcattctcagaaactgctttgtgatgattgcattcacctcacagagttgaacattcctcttgatagagcagtttggaaacactcttgttgtggaatgtgcaagtggagatttggagcgctttgaggcctatggtagtaaagggaatagcttcatagaaaaactagacagatgcattctcaggaactttttggtgatgtttgtattcaactcccagagttgaactttcctttggaaagagcagctatgaaacactctttttctagaatctgcaagtggacgtttggagggctttgtggtttgtggtggaaaaggaaatatcttcacctaaatactagatagaagcatcctcagaagcttctctgtgatgactgcattcaactcacggagttgaacactccttttgagagcgcagttttgaaactctctttctgtggcatctgcaaggggacatgtagacctctttgaagatttcgttggaaacggaatcatcttcacataaaaactatacagaagcagtctcagaatcttctttgtgatgtttgcattcaaatccccgagttgaactttcctttcaaagttcacgtttgaaacactctttttgcaggatctacaagtggatatttggaccactctgtgtccttcgttcgaaacgggtatatcttcacatgacatctagacagaagctttctcagaaaattctttgggatgattgagttgaactcacagagctgagcattccttgcgatgtagcagtttagaaacacactttctgcagaatctgcaagtgcatatttggacctctgtgaggaattcgttggaaacgggataatttcagctgactaaacagaagcattctcagaaccttcttcgtgatgtctgcattcaactcacagtgtggaacctttctttgatagttcaggtttgaaacactctttttgtagaaactgcaaggggataattgcactctttgaggagtaccgtagtaaaggaaataacttcctataaaaagaagacagaagcattctcagaaccctcttcgtgatgttcgcattcaactcacagtgctgaatctttctttgatagttcagctttgaaacactctttttgtagaaactgcaagtggatatttggtcctctctgaggatttctttggaaacgggataaactgcacagaactaaacagaagcattctcagaaccttcttcgtgatgtttgcattcaactcacagtgttgaaccttcctttgatagttcaggtttgaaacggtctttctgtagaaactgcaagtagatatttggacctctctgaggatttcgttggaaacgggataacccgcacagaactaaaacagaagcattcacagaaaactcttggtgacgactgagtttaactcacagagctgaacattcctttggatggagcagtttcgaaacacactatttgtagaatgtgcaagtggatatgtgggcctctctgaggatttcgttggaaacgggataaaccgcacagaactaaacagaagcattctcagaaactactttgtgatgattgcattcaagtcacagagttgaacattccctttgacagagcagtttggaaactctctttgtgtagaatctgcaagtggagatatggaccgctttgaagcctatggtagtaaaggaaatagcttcatataaaagctagacagtagcattctcagaaacttctttgtgatgcttgcattcaactcacagagttgaactttcctttcgagagagaagctttgaaacactctttttccagaatgtgcaagtggacatttggagggctttgaggcctgtggtggaaaaggaattatcttcccgtaaaagctagatagaagcattgtcagaaacttctttgtgatgattgcattcaactcacagagttgaaggttccttttcaaacagcagtttccaatcactctttctgtggaatctgcaagtggatatttgggcctctctgaggatttcgttggaaacgggataaaacgcacagaactaaaacagaagcattctcagaaacttctctgtgatgtttgtgttcaactcccagagtttcacattgcttctcatagagtagttctgaaacatgcttttcgtagtgtctgcaagtggacatttggagcgctttcaggcctgtggtggaaaacgaattatggtcacataaaaactggagagaagccttctcagaaacttctctgtgatgattgcattcaactcacagagttgaaccctcctatggatagagcagtgttgaaactctctttttgtggaatctgcaagtggatacgtggacctctccgaagatgtctttggaaacgggaatatcttcacataaaaactaaacagaagcattctcagaaacttcttggtgatgtttgcattcaaatcccagagttgaaccttcctttgatagttcaggtttgaaacactctttctgtaggatctgcaagtggctatttggaccactctgtggccttcgttcgaaacgggtatatcttcgcataaaatctagacagaagcattctcagaaaatactttgtgatgattgagtttaactcacagagctgaacattcctttggatggagcaggtttgagacacactttttgtagaatctacaagtggatatttggacctctctgaggatttcgttggaaacgcgataactgcacctaactaaacggaagcattctcagaaactgctttgtgatgattgcattcacctcacagagttgaacattcctattgatagagcagtttggaaacactcttgttgcggaatgtgcaagtggagatttggagcgctttgaggcctgtggtagtaaagggaatagcttcatagaaaaactagacagatgcattctcaggaactttttggtgatgtttgtattcaactcccagagttgaactttcctttggaaagagcagctatgaaacactctttttctagaatctgcaagtggacgtttggagggctttgtggtttgtggtggaaaaggaaatatcttcacctaaatactagatagaagcattctcagaagcttctctgtgatgactgcattcaactcacggagttgaacactcctcttgagagcgcagttttgaaactctctttctgtggcatccgcaagtggatatgtggacctctttgaagatgtctttggaaacgggaatatcttcacataaaaactaaacggaagcagtctcagaatcttctttgtggtgtttgcattcaaatcccagagttgaactttcctttcaaagttcacgtttgaaacactctttttgcaggatctacaagtggatatttggaccactctgtgtccttcgttcgaaacgggtatatcttcacatgacatctagacagaagctttctcagaaaattctttgggatgattgagttgagcaaacagagctgaacattccttgcgatgtagcagtttagaaacacactttctgcagaatctgcaagtgcatatgtggacctctctgaggaattcgttggaaacgggataatttcagctgactaaacagaagcattctcagaaccttcttcgtgatgtctgcattcaactcacagtgtggaacctttctttgatagttcaggtttgaaacactctttttgtagaaattgcaagggtataattgcacttctttgaggcctaccgtagtaaaggaaataacttcctataaaaagaagacagaagcattctcagaaccctcttcgtgatgtttgcattcaactcacagtgctgaacctttctttgatagttcagctttgaaacactctttttgtagaaactgcaagtggatatttggtcctctctgaggatttcgttggaaacgggataaaccgcacagaactaaacagaagcattctcagaaccttcttcgtgatgtttgcattcaactcacagtgttgaacctttctttgatagttcaggtttgaaacggtctttctgtagaaactgcaagtagatatttggacctctctgaggatttcgttggaaacgggataacccgcacagaactaaaacagaagcattcacagaaaactcttggtgacgactgagtttaactcacagagctgaacattcctttggatggagcagtttcgaaacacactatttgtagaatgtgcaagtggatatgtgggcctctctgaggatttcgttggaaacgggataaaccgcacagaactaaacagaagcattctcagaaactactttgtgatgattgcattcaagtcacagagttgaacattcccgttgacagagcagtttggaaactctctttgtgtagaatctgcaaagtggagatatggaccgctttgaggactatggtagtaaaggaaatagcttcatataaaagctagacagtagcattctcagaaacttctttgtgatgcttgcattcaactcacagagttgaactttcctttcgagagagaagctttgaaacactctttttccagaatctgcaagtggacatttggagggctttgaggcctgtggtggaaaaggaattatcttcccgtaaaagctagatagaagcattgtcagaaacttctttgtgatgattgcattcaagtcacagagttgaaggttccttttcaaaaagcagtttccaatcactctttctgtggaatctgcaagtggatatttggacctcttggaagatttcgttggaaacgggagaatcttcacagaaaagctaaacagaagcattctcagaaacttctctgtgatgtttgtgttcaactcccagagtttcacgttgcttttcatagagtagttctgaaacatgcttttcgtagtgtctgcaagtggacatttggagcgctttcaggcctgtggtggaaaacgaattatggtcacataaaaactggagagaagacttctcagaaacttctctgtgatgattgcattcaactcacagagttgaaccctcctacggttacagcagttttaaatctctcattttgtggaatctgcaagtggatatttggagggctttgaggcctgtggtggaaagggaattatcttcccgtaaaaactagatagaagcattctcagaaacttctttgtgatgtttgcattcaaatcccagagttgaaccttcttttgataggtcaggtttgaaacactctttctgtacgatctgcaagtggatatttggaccactctgtggccttcgttcgaaacgggtacatcttcacataacatctagacagaagcattctcagaaaatactttgtgatgattgagtttaactcacagagctgaacattcctttggatggagcaggtttgagacacactttttgtagaatctacaagtggatatttggacctctctgaggatttcgttggaaacgggataactgcacctaactaaacgggaagcattctcagaaactgctttgtgatgattgcattcacctcacagagttgaacattcctattgatagagcagtttggaaacactcttgttgtggaatgtgcaagtggagatttggagcgctttgaggcctgtggtagtaaagggaatagcttcatagaaaaactagacagatgcattctcaggaactttttggtgatgtttgtattcaactcccagagttgaactttcctttggaaagagcagctatgaaacactctttttctagaatctgcaagtggacgtttggagggctttgtggtttgtggtggaaaaggaaatatcttcacctaaatactagatagaagcattctcagaagcttctctgtgatgactgcattcaaatcacggagttgaacactccttttgagagcgcagttttgaaactctctttctctggcatctgcaaggggacatgtagacctctttgaagatttcgttggaaacggaatcatcttcacatcaaaactatacagaagcagtctcaagaatcttctttgtgatgtttgcattcaaatcccagagttgaactttcctttcaaagttcacgtttgaaacactctttttgcaggatctacaagtggatatttggaccactctgtgtccttcgttcgaaacgggtatatcttcacatgacatctagacagaagctttctcagaaaattctttgggatgattgagtggaactcacagagctgaacattccttgcgatgtagcagtttagaaacacactttctgcagaatctgcaagtgcatatttggacctctctgaggaattcgttggaaacgggataatttcagctgactaaacagaagcattctcagaaccttcttcgtgatgtctgcattcaactcacagtgtggaacctttctttgatagttcaggtttgaaacactctttttgtagaaactgcaaggggataattgcacttctttgaggcctaccgtagtaaaggaaataacttcctatagaaagaagacagaagaattctcagagccctcttcgtgatgtttgcattcaactcacagtgctgaacctttctttgatagtgcagctttgaaacactctttttgtagaaactgcaagtggatgtttggtcctctctgaggatttcgttggaaacgggataaaccgcacagaactaaaacagaagcattctcagaaccttcttcgtgatgtttgcattcaactcacagtgttgaacctttctttgatagttcaggttggaaacggtctttctgtagaaactgcaagtagatatttggacctctctgaggatttcgttggaaacgggataaaccgcacagaactaaaacagaagcattcacagaaaactcttggtgacgactgagtttaactcacagagctgaacattcctttggatggagcagtttcgaaacacactatttgtagaatgtgcaagtggatatttgggcctctctgaggatttcgttggaaacgggataaaccgcacagaactaaacagaagcattctcagaaactactttgtgatgattgcattcaagtcacagagttgaacattccctttgacagagcagtttggaaactctctttgtgtagaatctgcaagtggagatatggaccgctttgaggcctatggtagtaaaggaaataccttcatataaaagctagacagtagcattctcagaaacttctttgtgatgcttgcattcaactcacagagttgaactttcctttcgagagagaagctttgaaacactctttttccagaatgtgcaagtggacatttggggagctttgaggcctgtggtggaaaaggaattatcttcccgtaaaagctagatagaagcattgtcagaaacttctttgtgatgattgcattcaactcacagagttgaaggttccttttcaaacagcagtttccaatcactctttctgtggaatctgcaagtggatatttgggcctctctgaggatttcgttggaaacgggataaaacgcacagaactaaaacagaagcattctcagaaacttctctgtgatgtttgtgttcaactcccagagtttcacgttgcttttcatagagtagttctgaaacatgcttttcgtagtgtctgcaagtggacatttggagcgctttcaggcctgtggtggaaaacgaattatggtcacataaaaactggagagaagccttctcagaaacttctctgtgatgattgcattcaactcacagagttgaaccctcctatggatagagcagtgttgaaactctctttttgtggaatctgcaagtggatatgtggacctctccgaagatgtctttggaaacgggaatatcttcacataaaaactaaacagaagcattctcagaaacttcttggtgatgtttgcattcaaatcccagagttgaaccttcctttgatagttcaggtttgaaacactctttttgtaggatctgcaagtggctatttggaccactctgtggccttcgttcgaaacgggtatatcttcgcataaaatctagacagaagcattctcagaaaatactttgtgatgattgagtttaaatcacagagctgaacattcctttggatggagcaggtttgagacacactttttgtagaatctacaagtggatatttggacctctctgaggatttcgttggaaacgggagaactgcacctaagtaaacggaagcattctcagaaactgctttgtgatgattgcattcacctcacagagttgaacattcctattgatagagcagtttggaaacactcttgttgtggaatgtgcaagtggagatttggagcgctttgaggcctatggtagtaaagggaatagcttcatagaaaaactagacagatgcattctcaggaactttttggtgatgtttgtattcaactcccagagttgaactttcctttggaaagagcagctatgaaacactctttttctagaatctgcaagtggacgtttggagggctttgtggtttgtggtggaaaaggaaatatcttcacctaaatactagatagaagcattctcagaagcttctctgtgatgactgcattcaactcacggagttgaacactccttttgagagcgcagttttgaaactctctttctgtggcatctgcaaggggacatgtagacctctttgaagatttcgttggaaacggaatcatcttcacataaaaactatacagaagcagtctcagaatcttctttgtgatgtttgcattcaaatcccagagttgaactttcctttcaaagttcacgtttgacacactcttttgcaggatctacaagtggatatttggaccactctgtgtcctaagttcgaaacgggtatatcttcacatgacatctagacagaagctttctcagaaaattctttgggatgattgagttgaactcacagagctgagcattccttgcgatgtagcagtttagaaacacactttctgcagaatctgcaagtgcatatgtggacctctctgaggaattcgttggaaacgggataatttcagctgactaaacagaagcattctcagaaccttcttcgtgatgtctgcattcaactcaaagtgtggaacctttctttgatagttcaggttttaaaaactctttttgtacaaactgcaaggggataattgcactctttgaggagtaccgtagtaaaggaaataacttcctttaaaaagaagacagaagcattctcagaaccctcttcgtgatgtttgcattcaactcacagtgctgaacctttctttgatagttcagctttgaaacactcttcttgtagaaactgcaagtggatatttggtcctctctgaggatttcgttggaaacgggataaaccgcacagaactaaacagaagcattctcagaaccttcttcgtgatgtttgcattcaactcacagtgttgaacctttctttgatagttcaggtttgaaacggtctttctgtagaaactgcaagtagatatttggacctctctgaggatttcgttggaaacgggataacccgcacagaactaaaacagaagcattcacagaaaactcttggtgacgactgagtttaactcacagagctgaacattcctttggatggagcagtttcgaaacacactatttgtagaatgtgcaagtggatatttaggcctctctgaggatttcgttggaaacgggataaaccgcacagaactaaacagaagcattctcagaaactactttgtgatgattgcattcaagtcacagagttgaacattccctttgacagagcagtttggaaactctctttgtgtagaatctgcaagtggagatatggaccgctttgaggcctatggtagtaaaggaaatagcttcatataaaagctagacagtagcattctcagaaacttctttgtgatgcttgcattcaactcacagagttgaacttttctttcgagagagaagctttgaaacactctttttccagaatctgcaagtggacatttggagggctttgaggcctgtggtggaaaaggaattatcttcccgtaaaagctagatagaagcattgtcagaaacttcttcgtgatgattgcattcaactcacagagttgaaggttccttttcaaacagcagtttccaaacactctttctgtggaatctgcaagtggatatttggacctctttgaagatttcgttggaaacgggataatcttcacagaaaagctaaacagaagctttctcagaaacttctctgtgatgtttgtgttcaactcccagagtttcacattgcttttcatagactagttctgaaacatgctttttgtagtgtctgcaagtggacgtttggagcgctttcaggcctgtggtggaaaacgaattatggtcacataaaaactggagagaagccttctcagaaacttctctgtgatgattgcattcaactcacagagttgaaccctcctatggatagagcagtgttgaaactctctttttgtggaatctgcaagtggatatgtggacctctccgaagatgtctttggaaacgggaatatcgtcacataaaaactaaacagaagcattctcagaaacttcttggtgatgtttgcattcaaatcccagagttgaaccttcctttgatagttcaggtttgaaacactctttctgtaggatctgcaagtggctatttggaccactctgtggccttcgttcgaaacgggtatatcttcgcataaaatctagacagaagcattctcagaaaatactttgtgatgattgagtttaaatcacagagctgaccattcctttggatggagcaggtttgagacacactttttgtagaatctacaagtggatatttggacctctctgaggatttcgttggaaacgggataactgcacctaactaaacggaagcattctcagaaactgctttgtgatgattgcattcacctcacagagttgaacattcctattgatagagcagtttggaaacactcttgttgtggaatgtgcaagtggagatttggagcgctttgaggcctatggtagtaaagggaatagcttcatagaaaaactagacagatgcattctcaggaactttttggtgatgtttgtattcaactcccagagttgaactttcctttggaaagagcagctatgaaacactctttttctagaatctgcaagtggacgtttggagggctttgtggtttgtggtggaaaaggaaatatcttcacctaaatactagatagaagcattctcagaagcttctctgtgatgactgcattcaactcacggagttgaacactccttttgagagcgcagttttgaaactctctttctgtggcatctgcaaggggacatgtagacctctttgaagatttcgttggaaacggaatcatcttcacataaaaactatacagaagcagtctcagaatcttctttgtgatgtttgcattcaaatcccagagttgaactttcctttcaaagttcacgtttgaaacactctttttgcaggatctacaagtggatatttggaccactctgtgtccttcgttcgaaacgggtatatcttcacatgacatctagacagaagctttctcagaaaattctttgggatgattgagtggaactcacagagctgaacattccttgcgatgtagcagtttagaaacacactttctgcagaatgtgcaagtgcatatttggacctctctgaggaattcgttggaaacgggataatttcagctgactaaacagaagcattctcagaaccttcttcgtgatgtctgcattcaactcacagtgtggaacctttctttgatagttcaggtttgaaacactctttttgtagaaactgcaaggggataattgcacttctttgaggcctaccgtagtaaagtaaataacttcctatagaaagaagacagaagcattctcagaaccctcttcgtgatgtttgcattcaactcacggtgctgaacctttctttgatagttcagctttgaaacactctttttgtagaaactgcaagtggatatttggtcctctctgaggatttctttggaaacgggataaaccgcacagaactaaacagaagcattctcagaaccttcttcgtgatgtttgcattcaactcacagtgttgaacctttctttgatagttcaggtttgaaacggtctttctgtagaaactgcaagtagatatttggacctctctgaggatttcgttggaaacgggataaaccgcacagaactaaaacagaagcattcacagaaaactcttggtgacgactgagtttaactcacagagctgaacattcctttggatggagcagtttcgaaacacactatttgtagaatgtgcaagtggatatttaggcctctctgaggatttcgttggaaacgggataaaccgcacagaactaaacagaagcattctcagaaactactttgtgatgattgcattcaagtcacagagttgaacattccctttgacagagcagtttggaaactctctttgtgtagaatctgcaagtggagatatggaccgctttgaggcctatggtagtaaaggaaatagcttcatataaaagctagacagtagcattctcagaaacttctttgtgatgcttgcattcaactcacagagttgaactttcctttcgagagagaagctttgaaacactctttttccagaatgtgcaagtggacatttggggagctttgaggcctgtggtggaaaaggaattatcttcccgtaaaagctagatagaagcattgtcagagacttctttgtgatgattgcattcaagtcacagagttgaaggttccttttcaaagagcagtttccaatcactctttctgtggaatctgcaagtggatatttggacctcctttgaagatttcgttggaaacgggagaatcttcacagaaaagctaaacagaagcattctcagaaacttctctgtgatgtttgtgttcaactcccagagtttcacgttgcttttcatagagtagttctgaaacatgcttttcgtagtgtctgcaagtggacatttggagcgctttcaggcctgtggtggaaaacgaattatggtcacataaaaactggagagaagccttctcagaaacttctctgtgatgattgcattcaactcacagagttgaaccgtcctatggatagagcagtgttgaaactctctttttgtggaatctgcaagtggatatgtggacctctccgaagatgtctttggaaacggggtatcttcacataaaaactaaacagaagcattctcagaaacttcttggtgatgtttgcattcaaatcccagagttgaaccttcctttgatagttcaggtttgaaacactctttttgtaggatctgcaagtggatatttggaccactctgtggccttcgttcgaaacgggtatatcttcgcataaaatctagacagaagcattctcagaaaatactttgtgatgattgagtttaactcacagagctgaacattcctttggatggagcaggtttgagacacactttttgtagaatctacaagtggatatttggacctctctgaggatttcgttggaaacgcgataactgcacctaactaaacggaagcattctcagaaactgctttgtgatgattgcattcacctcacagagttgaacattcctattgatagagcagtttggaaacactcttgttgtggaatgtgcaagtggagatttggagcgctttgaggcctgtggtagtaaagggaatagcttcatagaaaaactagacagatgcattctcaggaactttttggtgatgtttgtattcaactcccagagttgaactttcctttggaaagagcagctatgaaacactctttttctagaatctgcaagtggacgtttggagggctttgtggtttgtggtggaaaaggaaatatcttcacctaaatactagatagaagcattctcagaagcttctctgtgatgactgcattcaactcacggagttgaacactccttttgagagcgcagttttgaaactctctttctgtggcatctgcaaggggacatgtagacctctttgaagatttcgttggaaacggaatcatcttcacataaaaactatacagaagcagtctcagaatcttctttgtgatgtttgcattcaaatcccagagttgaacttttctttcaaagttcacgtttgaaacactctttttgcaggatctacaagtggatatttggaccactctgtgtccttcgttcgaaacgggtatatcttcacatgacatctagacagaagctttctcagaaaattctttgggatgattgagtggaactcacagagctgaacattccttgcgatgtagcagtttagaaacacactttctgcagaatctgcaagtgcatatttggacctctctgaggaattcgttggaaacgggataatttcagctgactaaacagaagcattctcagaaccttcttcgtgatgtctgcattcaactcacagtgtggaacctttctttgatagttcaggtttgaaacactctttttgtagaaactgcaaggggataattgcacttctttgaggcctaccgtagtaaaggaaataacttcctatagaaagaagacagaagcattctcagaaccctcttcgtgatgtctgcattcaactcacagtgtggaacctttctttgatagttcaggtttgaaacactctttttgtagaaactgcaaggggataattgcacttctttgaggcctaccgtagtaaaggaaataacttcctatagaaagaagacagaagcattctcagaaccttcttcgtgatgtttgcattcaactcacagtgttgaacctttctttgatagttcaggtttgaaacggtctttctgtagaaactgcaagtagatatttggacctctctgaggatttcgttggaaacgggataaaccgcacagaactaaacagaagcattcacagaaaactcttggtgacgactgagtttaactcacagagctgaacattcctttggatggagcagtttcgaaacacactatttgtagaatgtgcaagtggatatttgggcctctctgaggatttcgttggaaacgggataaaccgcacagaactaaacagaagcattctcagaaactactttgtgatgattgcattcaagtcacagagctgaacattccctttgacagagcagtttggaaactctctttgtgtagaatctgcaagtgcagatatggaatgctttgaggactatggtagtaaaggaaatagcttcatagacaagctatacagtagcattctcagaaacttctttgtgatgcttgcattcaactcacagagttgaactttcctttcgagagagaagctttgaaacactctttttccagaatgtgcaagtggacatttggggagctttgaggcctgtggtggaaaaggaattatcttcccgtaaaagctagatagaagcattgtcagaaacttctttgtgatgattgcattcaactcacagagttgaaggttccttttcaaacagcagtttccaatcactctttctgtggaatctgcaagtggatatttgggcctctctgaggatttcgttggaaacgggataaaacgcacagaactaaaacagaagcattctcagaaacttctctgtgatgtttgtgttcaactcccagagtttcacgttgcttttcatagagtagttctgaaacatgcttttcgtagtgtctgcaagtggacatttggagcgctttcaggcctgtggtggaaaacgaattatggtcacataaaaactggagagaagccttctcagaaacttctctgtgatgattgcattcaactcacagagttgaaccctcctatggatagagcagtgttgaaactctctttttgtggaatctgcaagtggatatgtggacctctccgaagatgtctttggaaacgggaatatcttcacataaaaactaaacagaagcattctcagaaacttcttggtgatgtttgcattcaaatcccagagttgaaccttcctttgatagttcaggtttgaaacactctttttgtaggatctgcaagtggatatttggaccactctgtggccttcgttcgaaacgggtatatcttcgcataaaatccagacagaagcattctcagaaaatactttgtgatgattgagtttaaatcacagagctgaccattcctttggatggagcaggtttgagacacactttttgtagaatctacaagtggatatttggacctctctgaggatttcgttggaaacgggataactgcacctaactaaacggaagcattctcagaaactgctttgtgatgattgcattcaccctcacagagttgaacattcctattgatagagcagtttggaaacactcttgttgtggaatgtgcaagtggagatttggagcgctttgtggcctatggtagtaaagggaatagcttcatagaaaaactagacagatgcattctcaggaactttttggtgatgtttgtattcaactcccagagttgaactttcctttggaaagagcagctatgaaacactctttttctagaatctgcaagtggacgtttggagggctttgtggtttgtggtggaaaaggaaatatcttcacctaaatactagatagaagcattctcagaagcttctctgtgatgactgcattcaactcacggagttgaacactccttttgagagcgcagttttgaaactctctttctgtggcatctgcaaggggacatgtagacctctttgaagatttcgttggaaacggaatcatcttcacataaaaactatacagaagcagtctcagaatcttctttgtgatgtttgcattcaaatcccagagttgaactttcctttcaaagttcacgtttgaaacactctttttgcaggatctacaagtggatatttggaccactctgtgtccttcgttcgaaacgggtatatctccacacgacatctagacagaagctttctcagaaaattctttgggatgattgagtggaactcacagagctgaacattccttgcgatgtagcagtttagaaacacactttctgcagaatctgcaagtgcatatttggacctctctgaggaattcattggaaacgggataatttcagctgactaaacagaagcattctcagaaccttcttcgtgatgtctgcattcaactcacagtgtggaacctttctttgatagttcaggtttgaaacactctttttgtagaaactgcaaggggataattgcacttctttgaggcctaccgtagtaaaggaaataacttcctatagaaagaagacagaagcattctcagaaccctcttcgtgatgtttgcattcaactcacagtgctgaacctttctttgatagttcagctttgaaacactcttcttgtagaaactgcaagtggatatttggtcctctctgaggatttcgttggaaacgggataaaccgcacagaactaaacagaagcattctcagaaccctcttcgtgatgtttgcattcaactcacagtgctgaacctttctttgatagttcagctttgaaacactctttttgtagaaactgcaagtggatatttggtcctctctgagcatttcgttggaaacgggataaaatacacagaactaaacaggaagcattcacagaaaactcttggtgacgactgagtttaactcacagagctggacattcctttggatggagcagtttcgaaacacactatttgtagaatctgcaagtggatatttgggcctctctgaggatttcgttggaaacgggataaacagcacagaactaaacagaagcattctcagaaactactttgtgatgattgcattcaagtcacagagttgaacattccctttgacagagcagtttggaaactctctttgtgtagaatctgcaagtggagatatggaccgctttgaggcctatggtagtaaaggaaatagcttcatataaaagctagacagtagcattctcagaaacttctttgtgatgcttgcattcaactcacagagttgaactttcctttcgagagagaagctttgaaacactctttttccagaatgtgcaagtggacatttggggagctttgaggcctgtggaggaaaaggaattatcttcccgtaaaagctagatagaagcattgtcagaaacttctttgtgatgattgcattcaactcacagagttgaaggttccttttcaaacagcagtttccaatcactctttctgtggaatctgcaagtggatatttgggcctctctgaggatttcgttggaaacgggataaaacgcacagaactaaaacagaagcattctcagaaacttctctgtgatgtttgtgttcaactcccagagtttcacattgcttttcatagagtagttctgaaacatgcttttcgtagtgtgtacaagtgcacatttggagcgctttcaggcctgtggtggaaaacgaattatggtcacataaaaactggagagaagccttctcagaaacttctctgtgatgattgcattcaactcacagagttgaaccctcctatggatagagcagtgttgaaactctctttttgtggaatctgcaagtggatatgtggacctctccgaagatgtctttggaaacgggaatatcttcacataaaaactaaacagaagcattctcagaaacttcttggtgatgtttgcattcaaatcccagagttgaaccttcctttgatagttcaggtttgaaacactctttctgtaggatctgcaagtggctatttggaccactctgtggccttcgttcgaaacgggtatatcttcgcataaaatctagacagaagcattctcagaaaatactttgtgatgattgagttgaactcacagagctgaacattcctttggatggagcaggtttgagacacactttttgtagaatctacaagtggatatttggacctctctgaggatttcgttggaaacgggataactgcacctaactaaacggaagcattctcagaaactgctttgtgatgattgcattcacctcacagagttgaacattcctattgatagagcagtttggaaacactcttgttgtggaatgtgcaagtggagatttggagcgctttgaggcctatggtagtaaagggaatagcttcatagaaaaactagacagatgcattctcaggaactttttggtgatgtttgtattcaactcccagagttgaactttcctttggaaagagcagctatgaaacactctttttctagaatctgcaagtggacgtttggagggctttgtggtttgtggtggaaaaggaaatatcttcacctaaatactagatagaagcattctcagaagcttctctgtgatgactgcattcaactcacggagttgaacactccttttgagagcgcagttttgaaactctctttctgtggcatctgcaaggggacatgtagacctctttgaagatttcgttggaaacggaatcatcttcacataaaaactatacagaagcagtctcagaatcttctttgtgatgtttgcattccaatcccagaattgaactttcctttcaaagttcacgtttgaaacactctttttgcaggatctacaagtggatatttggaccactctgtgtccttcgttcgaaacgggtatatcttcacatgacatctagacagaagctttctcagaaaattctttgggatgattgagtggaactcacagagctgaacattccttgcgatggagcagtttagaaacacactttctgcagaatctgcaagtgcatatttggacctctctgaggaattcgttggaaacgggataatttcagctgactaaacagaaagcattctcagaaccttcttcgtgatgtctgcattcaactcacagtgtggaacctttctttgacagttcaggtttgaaacactctttttgtagaaactgcaaggggatcattgcacttctttgaggcctaccgtagtaaaggagataacttcctataaaaagaagacagaagcattctcagaaccctcttcgtgatgtttgcattcaactcacagtgctgaacctttctttgatagttcagctttgaaacactcttcttgtagaaactgcaagtggatatttggtcctctctgaggatttcgttggaaacgggataaaccgcacagaactaaacagaagcattctcagaaccttcttcgtgatgtttgcattcaactcacagtgttgaacctttctttgatagttcaggtttgaaacggtctttctgtagaaactgcaagtagatatttggacctctctgaggatttcgttggaaacgggataacccgcacagaactaaaacagaagcattcacagaaaactcttggtgacgactgagtttaactcacagagctgaacattcctttggatggagcagtttcgaaacacactatttgtagaatgtgcaagtggatatttgggcctctctgaggatttcgttggaaacgggataaaccgcacagaactaaacagaagcattctcagaaactactttgtgatgattgcattcaagtcacagagctgaacattccctttgacagagaagtttggaaactctctttgtgtagaatctgcaagtggagatatggaatgctttgaggcatatggtagtaaaggaaatagcttcatataaaagctagacagtagcattctcagaaacttctttgtgatgcttgcattcaactcacagagttgaactttcctttcgagagagaagctttgaaacactctttttccagaatctgcaagtggacctttggagggctttgatgtctgtggtggaaatggaattatcttcccgtaaaagctagatagaagcattgtcagaaacttctttgtgatgattgcattcaactcacagagttgaaggttccttttcaaagagcagtttccaatcactctttctgtggagtctgcaagtggatatttggacctattttgaagatttcgttggaaacgggagaatcttcacaggaaagctaaacagaagcattctcagaaacttctctgtgatgtttgtgttcaactcccagagtttcacattgcttttcatagagtagttctgaaacatgcttttcgtagtgtctacaagtggacatttggagcgctttcaggcctgtggtggaaaacgaattatggtcacataaaaactggagagaagccttctcagaaacttctctgtgatgattgcattcaactcacagagttgaaccctcctatggatagagcagtgttgaaactctctttttgtcgaatctgcaagtggatatgtggacctctccgaagatgtctttggaaacgggaatatcttcacataaaaactaaacagaagcattctcagaaacttcttggtgatgtttgcattcaaatcccagagttgaaccttcctttgatagttcaggtttgaaacactctttttgtaggatctgcaagtggatatttggaccactctgtggccttcgttcgaaacgggtatatcttcgtataaaatctagacagaagcattctcagaaaatactttgtgatgattgagttgaactcacagagctgaacattcctttggatggagcaggtttgagacacactttttgtagaatctacaagtggatatttggacctctctgaggatttcgttggaaacgggataactgcacctaactaaacggaagcattctcagaaactgctttgtgatgattgcattcacctcacagagttgaacattcctattgatagagcagtttggaaacactcttgttgtggaatgtgcaagtggagatttggagcgctttgaggtctatggtagtaaagggaatagcttcatagaaaaactagacagatgcattctcaggaaccttttggtgatgtttgtattcaactcccagagttgaactttcctttggaaagagcagctatgaaacactctttttctagaatctgcaagtggacgtttggagggctttgtggtttgtggtggaaaaggaaatatcttcacctaaatactagacagaagcattctcagaagcttctctgtgatgactgcattcaactcacggagttgaacactccttttgagagcgcagttttgaaactctctttctgtggcatctgcaaggggacatgtagacctctttgaagatttcgttggaaacggaatcatcttcacataaaaactatacagaagcagtctcagaatcttctttgtgatgtttgcattcaaatcccagagttgaactttcctttcaaagttcacgtttgaaacactctttttgcaggatctacaagtggatatttggaccactctgtgtccttcgttcgaaacgggtataacttcacacgacatctagacagaagctttctcagaaaattctttgggatgattgagtggaactcacagagctgaacattccttgcgatgtagcagtttagaaacacactttctgcagaatctgcaagtgcatatttggacctctctgaggaattcgttggaaacgggataatttcagctgactaaacagaagcattctcagaaccttcttcgtgatgtctgcattcaactcacagtgtggaacctttctttgatagttcaggtttgaaacactctttttgtagaaactgcaaggggataattgcacttctttgaggcctaccgtagtaaaggaaataacttcctatagaaagaagacagaagcattctcagaaccctcttcgtgatgtttgcattcaactcacagtgctgaacctttctttgatagttcagctttgaaacactcttcttttagaaactgcaagtggatatttggtcctctctgaggatttcgttggaaacgggataaaccgcacagaactaaacagaagcattctcagaaccctcttcgtgatgtttgcattcaactcacagtgctgaacctttctttgatagttcagctttgaaacactctttttgtagaaactgcaagtggatatttggtcctctctgaggatttcgttggaaacggcataaaccgcacagaactaaacagaagcattcacaaaaaactcttggtgacgactgagtttaactcacagagctgaacattcctttggatggaacagtttcgaaacacactatttgtagaatctgcaagtggatatgtgggcctctctgaggatttcgttcgaaacgggataaaccgcacagaactaaaacagaagcattctgagaaactactttgtgatgattgcattgaagtcacagagctgaacattccctttgacagagcagtttggaaactctctttgtgtagaatctgcaagtggagatatggaatactttcaggactatggtagtaaaggaaatagcttcatataaaagctagacagtagcattgtcagaaacttctttgtgatgattgcattcaactcacagagttgaactttcctttcgagagagaagctttgaaacactctttttccagaatctgcaagtggacatttggagggctttgaggcctgtggtggaaaaggaattatcttcccgtaaaagctggatagaagcattctcagaaacttctcagtgatgtttgtgttcaactcccagagtgtcacattgcttctcatagagcagttctgaaacatgcttttcgtagtgtctgcaactggacatttggagcgctttcaggcctgtggtggaaaacgaattatggtcacataaaaactggagagaagccttctcagaaacttctctgtgatgattgcattcaactcacagagttgaaccctcctatggatagagcagtgttgaaactctctttttgtggaatctgcaagtggatatgtggacctctccgaagatgtctttggaaacgggaatatcttcaccctaaaaactaaacagaagcattctcagaaacttcttggtgatgtttgcattcaaatcccagagttgaaccttcctttgagagttcaggtttgaaacactctttttgtaggatctgcaagtggatatttggaccactctgtggccttcgttcgaaaccggtacatcttcgcataaaatctagacagaagcattctcagaaaatactttgtgatgattgagttgaactcacagagctgaacattcctttggatggagcaggtttgagacacactttttgtagaatctacaagtggatatttggacctctctgaggatttcgttggaaacgggataactgcacctaactaaacggaagcattctcagaaactgctttgtgatgattgcattcacctcacagagttgaacattcctattgatagagcagtttggaaacactcttgttgtggaatgtgcaagtggagatttggagcgctttgaggcctatggtagtaaagggaatagcttcatagaaaaactagacagatgcattctcaggaactttttggtgatgtttgtattcaactcccagagttgaactttcctttggaaagagcagctatgaaacactctttttctagaatctgcaagtggacgtttggagggctttgtggtttgtggtggaaaaggaaatatcttcacctaaatactagatagaagcattctcagaagcttctctgtgatgactgcattcaactcacggagttgaacactccttttgagagcgtagttttgaaactctctttctgtggcatctgcaaggggacatgtagacctctttgaagatttcgttggaaacggaatcatcttcacataaaaactatacagaagcagtctcagaatcttctttgtgatgtttgcattcaaatcccagagttgaactttcctttcaaagttcacgtttgaaacactctttttgcaggatctacaagtggatatttggaccactctgtgtccttcgttcgaaacgggtatatcttcacacgacatctagacagaagctttctcagaaaattctttgggatgattgagtggaactcacagagctgaacattccttgcgatgtagcagtttagaaacacactttctgcagaatctgcaagtgcatatttggacctctctgaggaattcgttggaaacgggataatttcagctgactaaacagaagcattctcagaaccttcttcgtgatgtctgcattcaactcacagtgtggaacctttctttgatagttcaggtttgaaacactctttttgtagaaactgcaaggggataattgcacttctttgaggcctaccgtagtaaaggaaataacttcctatagaaagaagacagaagcattctcagaaccctcttcgtgatgtttgcattcaactcacggtgctgaacctttctttgatagttcagctttgaaacactctttttgtagaaactgcaagtggatatttggtcctctctgaggatttcgttggaaaagggataaaccgcacagaactaaacagaagcattctcagaaccctcttcgtgatgtttgcattcaactcacagtgctgaacctttctttgatagttcagctttgaaacggtctttctgtagaaactgcaagtagatatttggacctctccgaggatttcgttggaaacgggataaaccgcacagaactaaaacagaagcattcacagaaaactcttggtgacgactgagtttaactcacagagctgaacattcctttggatggaacagtttcgaaacacactatttgtagaatctgcaagtggatatttgggcctctctgaggatttcgttggaaacgggataaaccgcacagaactaaaacagaagcattctcagaaactactttgtgatgattgcattcaagtcacagagttgaacattccctttgacagagcagtttggaaactctctttgtgtagaatctgcaagtggagatatggaccgctttgaggcctatggtagtaaaggaaatagcttcatataaaagctagacagtagcattctcagaaacttctttgtgatgcttgcattcaactcacagagttgaactttcctttcgagagagaagctttgaaacactctttttccagaatctgcaagtggacatttggagggctttgaggcctgtggtggaaaaggaattatcttcccgtaaaagctagatagaagcattgtcagaaacttctttgtgatgattgcattcaactcacagagttgaaggttccttttcaaacagcagtttccaatcactctttctgtggaatctgcaagtggatatttgggcctctctgaggatttcgttggaaacgggataaaacgcacagaactaaaacagaagcattctcagaaacttctctgtgatgtttgtgttcaactcccagagtttcacattgcttttcatagagtagttctgaaacatgcttttcgtagtgtctgcaagtggacatttggagcgctttcaggcctgtggtggaaaacgaattatggtcccataaaaactggagagaagccttctcagaaacttctctgtgatgattgcattcaactcacagatttgaaccctcctatggatagagcattgttgaaactctctttttgtggaatctgcaagtggatatgtggacctctccgaagatgtctttggaaacgggcatatcttcacataaaaactaaacagaagcattctcagaaacttcttggtgatgtttgcattcaaatcccagagttgaaccttcctgtgatagttcaggtttgaaacactctttttgtaggatctgcaagtggatatttggaccactctgtggccttcgttcgaaacgggtacatcttcacataaaatctagacagaagcattctcagaaaatactttgtgatgattgagtttaaatcacagagctgaccattcctttggatggagcaggtttgagacacactttttgtagaatctacaagtggatatttggacctctctgaggatttcgttggaaacgggataactgcacctaactaaacggaagcattctcagaaactgctttgtgatgattgcattcacctcacagagttgaacattcctattgatagagcagtttggaaacactcttgttgtggaatgtgcaagtggagatttggagcgctttgaggcctgtggtagtaaagggaatagcttcatagaaaaactagacagatgcattctcaggaactttttggtgatgtttgtattcaactcccagagttgaactttcctttggaaagagcagctatgaagcactctttttctagaatctgcaagtggacgtttggagggctttgtggtttgtggtggaaaaggaaatatcttcacctaaatactagagagaagcattctcagaagcttctctgtgatgactgcattcaactcacggagttgaacactccttttgagagcgcagttttgaaactctctttctgtggcatctgcaaggggacatgtagacctctttgaagatttcgttggaaacggaatcatcttcacataaaaactatacagaagcagtctcagaatcttctttgtgatgtttcgcattcaaatcccagagttgaactttcctttccaagttcacgtttgaaacactctttttgcaggatctacaagtggatatttggaccactctgtgtccttcgttcgaaacgggtatatcttcacatgacatctagacagaagctttctcagaaaattctttgggatgattgagtggaactcacagagctgaacattccttgcgatgtagcagtttagaaacacactttctgcagaatctgcaagtgcatatttggacctctctgaggaattcgttggaaacgggataatttcagctgactaaacagaagcattctcagaaccttcttcgtgatgtctgcattcaactcacagtgtggaacctttctttgatagttcaggtttgaaacactctttttgtagaaactgcaaggggataattgcactctttgaggagtaccgtagtaaaggaaataacttcctataaaaagaagacagaaagcattctcaggaccctcttcgtgatgtttgcattcaactcacagtgctgaacctttctttgatagttcagctttgaaacactctttttgtagaaactgcaagtggatatttggtcctctctgaggatttcgttggaaacgggataaaccgcacagaactaaacagaagcattctcagaaccctcttcgtgatgtttgcattcaactcacagtgttgaacctttctttgatagttcaggttggaaacggtctttctgtagaaactgcaagtagatatttggacctctctgaggatttcgttggaaacgggataaaccgcacagaactaaaacagaagcattcacagaaaactcttggtgacgactgagtttaactcacagagctgaacatccctttggatggagcagtttcgaaacacactatttgtagaatgtgcaagtggatattggggcctctctgaggatttcgttggaaacggtataaacggcacagaaataaacagaagcattctcagaaactactttgtgatgattgcattcaagtcacagagttgaacattccctttgacagagcagtttggaaactctctttgtgtagaatctgcaagtggagatatggaccgctttgaggcctatggtagtaaaggaaatagcttcatataaaagctagacagtagcattctcagaaacttctttgtgatgcttgcattcaactcacagagttgaactttcctttcgagagagaagctttcaaacactctttttccagaatctgcaagtggacatttggagggctttgaggcctgtggtggaaaaggaattatcttcccgtaaaagctagatagaagcattgtcagaaacttctttgtgatgattgcattcaactcacagagttgaaggttccttttcaaacagcagtttccaatcactcattctgtggaatgtgcaagtggatatttggacctctttgaagatttcgttggaaacgggagaatcttcacagaaaagctaaacagaaagcattctcagaaacttctctgtgatgtttgtgttcaactcccagagtttcacattgcttctcatagagtagttctgaaacatgcttttcgtagtgtctgcaagtggacatttggagcgctttcaggcctgtggtggaaaacgaattatggtcccataaaaactggagagaagccttctcagaaacttctctgtgatgattgcattcaactcacagagttgaaccctcctatggatagagcagtgttgaaactctctttttgtcgaatctgcaagtggatatgtggacctctccgaagttgtctttggaaacgggaatatcttcacataaaaactaaacagaagcattctcagaaacttcttggtgatgtttgcattcaaatcccagagttgaaccttcctttgatagttcaggtttgaaacactctttttgtaggatctgcaagtggctatttggaccactctgtggccttcgttcgaaacgggtatatcttcgcataaaatctagacagaagcattctcagaaaatactttgtgatgattgagtttaactcacagagctgaacattcctttggatggagcaggttcgagacacactttttgtagaatctacaagtggatatttggacctctctgaggatttcgttggaaacgggataactgcacctaactaaacggaagcattctcagaaactgctttgtgatgattgcattcacctcacagagttgaacattcctattgatagagcagtttggaaacactcttgttgtgggatgtgcaagtggagatttggagcgctttgaggcctatggtagtaaagggaatagcttcatagaaaaactagacagatgcattctcaggaactttttggtgatgtttgtattcaactcccagagttgaactttcctttggaaagagcagctatgaaacactctttttctagaatctgcaagtggacgtttggagggctttgtggtttgtggtggaaaaggaaatatcttcacctaaatactagatagaagcattctcagaagcttctctgtgatgactgcattcaactcacggagttgaacactccttttgagagcgcagttttgaaactctctttctgtggcatctgcaaggggacatgtagacctctttgaagatttcgttggaaacggaatcatcttcacataaaaactatacagaagcagtctcagaatcttctttgtgatgtttgcattcaaatcccagagttgaactttcctttcaaagttcacgtttgaaacactctttttgcaggatctacaagtggatatttggaccactctgtgtccttcgttcgaaacgggtataacttcacacgacatctagacagaagctttctcagaaaattctttgggatgattgagttgaactcacagagctgaacattccttgcgatgtagcagtttagaaacacactttctacagaatctgcaagtgcatatttggacctctctgaggaattcgttggaaacgggataatttcagctgactaaacagaagcattctcagaaccttcttcgtgatgtctgcattcaactcacagtgtggaacctttctttgatagttcaggtttgaaacactctttttgtagaaactgcaaggggatcattgcacttctttgaggcctaccgtagtaaaggaaataacttcctataaaaagaagacagactctctgaggattgcattcaactcacagtgctgaacctttctttgatagtgcagctttgaaacactctttttgtagaaactgcaagtggatatttggtcctctctgaggatttcgttggaaacgggataaaccgcacagaactaaaacagagcattctcagaaccttcttcgtgatgtttgcattcaactcacagtgttgaacctttctttgatagttcaggttggaaacggtctttctgtagaaactgcaagtagatatttggacctctctgaggatttcgttggaaacgggataaaccgcacagaactaaaacagaagcattcacagaaaactcttggtgacgactgagtttaactcacagagctgaacattcctttggatggagcagtttcgaaacacactatttgtagaatctgcaagtggatatttgggcctctctgaggatttcgttggaaacgggataaaacgcacagaactaaaacagaagcattctcagaaactactttgtgatgattgcattcaagtcacagagttgaacattccctttgacagagcagtttggaaactctctttgtgtagaatctgcaagtggagatatggaccgctttgaggcctatggtagtaaaggaaatagcttcatataaaagctagacagtagcattctcagaaacttctttgtgatgcttgcattcaactcacagagttgaactttcctttcgagagagaagctttgaaacactctttttccagaatctgcaagtggacatttggagggctttgaggcctgtggtggaaaaggaattatcttcccgtaaaagctagatagaagcatagtcagaagcttctttgtgatgattgcattcaactcacagagttgaaggttccttttcaaacagcagtttccaatcactctttctgtggaatctgcaagtgtatatttggacctattttgaagatttcgttggaaacgggataatcttcacagaaaagctaaacagaagcattctcagaaacttctctgtgatgtttgtgttcaactcccagagtttcacattgcttttcatagagtagttctgaaacatgcctttcgtagtgtctgcaagtggacatttggagagatttcaggcctgtggtggaaaacgaattatggtcacataaaaactggagagaagccttctcagaaacttctctgtgatgattgcattcaactcacagagttgaaccctcctatggatagagcagtgttgaaactctctttttgtggaatctgcaagtggatatgtggacctctccgaagatgtctttggaaacgggaatatcttcacataaaaactaaacagaagcattctcagaaacttcttggtgatgtttgcattcaaatcccagagttgaaccttcctttgatagttcaggtttgaaacactctttctgtaggatctgcaagtggctatttggaccactctgtggccttcgttcgaaacgggtatatcttcgcataaaatctagacagaagcattctcagaaaatactttgtgatgattgagtttaaatcacagagctgaccattcctttggatggagcaggtttgagacacactttttgtagaatctacaagtggatatttggacctctctgaggatttcgttggaaacgggataactgcacctaactaaacggaagcattctcagaaactgctttgtgatgattgcattcacctcacagagttgaacattcctattgatagagcagtttggaaacactcttgttgtggaatgtgcaagtggagatttggagcgctttgaggcctgtggtagcaaagggaatagcttcatagaaaaactagacagatgcattctcaggaactttttggtgatgtttgtattcaactcccagagttgaactttcctttggaaagagcagctatgaaacactctttttctagaatctgcaagtggacgtttggagggctttgtggtttgtggtggaaaaggaaatatcttcacctaaatactagatagaagcattctcagaagcttctctgtgatgactgcattcaactcacggagttgaacactccttttgagagcgcagttttgaaactctctttctgtggcatctgcaaggggacatgtagacctctttgaagatttcgttggaaacggaatcatcttcacataaaaactatacagaagcagtctcagaatcttctttgtgatgtttgcattcaaatcccagagttgaactttcctttcaaagttcacgtttgaaacactctttttgcaggatctacaagtggatatttggaccactctgtgtccttcgttcgaaacgggtatatcttcacatgacatctagacagaagctttctcagaaaattctttgggatgattgagtggaactcacagagctgaacattccttgcgatgtagcagtttagaaacacactttctgcagaatctgcaagtgcatatttggacctctctgaggaattcgttggaaacgggataatttcagctgactaaacagaagcattctcagaaccttcttcgtgatgtctgcattcaactcacagtgtggaacctttctttgatagttcaggtttgaaacactctttttgtagaaactgcaaggggataattgcacttctttgaggcctaccgtagtaaaggaaataacttcctatagaaagaagacagaagaattctcagagccctcttcgtgatgtttgcattcaactcacagtgctgaacctttctttgatagtgcagctttgaaacactctttttgtagaaactgcaagtggatgtttggtcctccctgaggatttcgttggaaacgggataaaccgcacagaactaaaacagaagcattctcagaaccttcttcgtgatgtttgcattcaactcacagtgttgaacctttctttgatagttcaggttggaaacggtctttctgtagaaactgcaagtagatatttggacctctctgaggatttcgttggaaacgggataaaccgcacagaactaaaacagaagcattcacagaaaactcttggtgacgactgagtttaactcacagagctgaacattcctttggatggagcagtttcgaaacacactatttgtagaatctgcaagtggatatttgggcctctctgaggatttcgttggaaacgggataaaccgcacagaactaaaacagaagcattctcagaaactactttgtgatgattgcattcaagtcacagagttgaacattccctttcacagagcagtttggaaactctctttgtgtagaatctgcaagtggagatatggaccgctttgaggactatggtagtaaaggaaatagcttcatataaaagctagacagtagcattctcagactcttctttgtgatgcttgcattccactcacagagttgaaaattccttttgagagacaagctttgaaacactctttttccagaatctgcaagtggacatttggagggctttgaggcctgtggtggaaaaggaattatcttcccgtaaaagctagatagaagcattgtcagaaacttcctttgtgatgattgcattcaacacacagagttgaaggttccttttcaaagagcagtttccaatcactctttctgtggaatctgaaagtggatatttggacctctttgaagatttcgttggaaacgggagaatcttcacagaaaagctaaacagaagcattctcagaaacttctctgtgatgtttgtgttcaactcccagagtttcacgttgcttttcatagagtagttctgaaacatgcttttcgtagtgtctgcaagtggacatttggagcgctttcaggcctgtggtggaaaacgaattatggtcacataaaaactggagagaagccttctcagaaacttctctgtgatgattgcattcaactcacagtgttgaaccctcctatggatagagcagtgttgaaactctctttttgtggaatctgcaagcagatatgtggacctctccgaagatgtctttggaagcgggaatatcttcacataaaaactaaacagaagcattctcagaaacttcttggtgatgtttgcattcaaatcccagagttgaaccttcctttgatagttcaggtttgaaacactctttctgtaggatctgcaagtggctatttggaccactctgtggccttcgttcgaaacgggtatatcttcgcataaaatctagacagaagcattctcagaaaatactttgtgatgattgagtttaaatcacagagctgaccattcctttggatggagcaggtttgagacacactttttgtagaatctacaagtggatatttggacctctctgaggatttcgttggaaacgggataactgcacctaactaaacggaagcattctcagaaactgctttgtgatggttgcattcacctcacagagttgaacattcctattgatagagcagtttggaaacactcttgttgtggaatgtgcaagtggagatttggagcgctttgaggcctatggtagtaaagggaatagcttcatagaaaaactagacagatgcattctcaggaactttttggtgatgtttgtattcaactcccagagttgaactttcctttggaaagagcagctatgaaacactctttttctagaatctgcaagtggacgtttggagggctttgtggtttgtggtggaaaaggaaatatcttcacctaaatactagatagaagcattctcagaagcttctctgtgatgactgcattcaactcaaggagttgaacactccttttgagagcgcagttttgaaactctctttctgtggcatctgcaaggggacatgtagacctctttgaagatttcgttggaaacggaatcatcttcacataaaaactatacagaagcattctcagaaacttcttggtgatgtttccattcaaatcccagagttgaaccttcctttgatagttcaggattgaaacactctttttgtaggatctacaagtggatatttggaccactctgtgtccttctttcgaaacgggtatatgttcacatgacatctagacagaagcattctcagaaaatactttgtgatgattgagtttaactcacagagctgaacattcctttggatggagcaggtttgatacacactttttgtagtatctacaagtggatatttggacctctctgaggatttcgttggaaacgggataactgcacctaactaaacggaagcattctcagaaactgctttgtgatgattgcattcacctcacagagttgaacattcctattgatagagcagtttggaaacactcttgttgtggaatgtgcaagtggagatttggagcgctttgaggcctgtggtagtaaagggaatagcttcatagaaaaactagacagatgcattctcaggaaccttttggtgatgtttgtattcaactcccagagttgaactttcctttggaaagagcagctatgaaacactctttttctagaatctgcaagtggacgtttggagggctttgtggtttgtggtggaaaaggaaatatcttcacctaaatactagatagaagcattctcagaagcttctctgtgatgactgcattcaactcacggagttgaacactccttttgagagcgcagttttgaaactcactttctgtggcatctgcaaggggacatgtagacctctttgaagatttcgttggaaacggaatcatcttcacataaaaactatacagaagcagtctcagaatcttctttgtgatgtttgcattcaaatcccagagttgaactttcctttcaaagttcacgtttgaaacactctttttgcaggatctacaagtggatatttggaccactctgtgtccttcgttcgaaacgggtatatcttcacatgacatctagacagaagctttctcagaaaattctttggaatgattgagttgaactcacagagctgaacattccttgcgatgtagcagtttagaaacacactttctgcagaagctgcaagtgcatatttggacctctctgaggaattcgttggaaacgggataatttcagctgactaaacagaagcattctcagaaccttcttcgtgatgtctgcattcaactcacagtgtggaacctttctttgatagttcaggtttgaaacactctttttgtagaaactgcaaggggataattgcacttctttgaggcctaccgtagtaaaggaaataacttcctatagaaagaagacagaagcattctcagaaccctcttcgtgatgtttgcattcaactcacagtgctgaacctttctttgatagttcagctttgaaacactcttcttgtagaaactgcaagtggatatttggtcctctctgaggatttcgttggaaacgggataaaccgcacagaactaaacagaagcattctcagaaccttcttcgtgatgtttgcattcaactcacagtgttgaacctttctttgatagttcaggtttgaaacggtctttctgtagaaactgcaagtagatatttggacctctctgaggatttcgttggaaacgggataacccgcacagaactaaaacagaagcattcacagaaaactcttggtgacgactgagtttaactcacagagctgaacattcctttggatggagcagtttcgaaacacactatttgtagaatgtgcaagtggatatgtgggcctctctgaggatttcgttggaaacgggataaaccgcacagaactaaacagaagcattctcagaaactactttgtgatgattgcattcaagtcacagagttgaacattccctttgacagagcagtttggaaactgtctttgtgtagaatctgcaagtggagatatggaccgctttgaggcctatggtagtaaaggaaatagcttcatataaaagctagacagtagcattctcagaaacttctttgtgatgcttgcattcaactcacagagttgaactttcctttcgagagagaagctttgaaacactctttttccagaatctgcaagtggacatttggagggctttgaggcctgtggtggaaaaggaattatcttcccgtaaaagctggatagaagcattgtcagaaacttctttgtgatgattgcattcaactcacagagttgaaggttccttttcaaacagcagtttccaatcactctttctgtggaatctgcaagtggatatttgggcctctctgaggatttcgttggaaacgggataaaacgcacagaactaaaacagaagcattctcagaaacttctctgtgatgtttgtgttcaactcccagagtttcacgttgcttttcatagagtagttctgaaacatgcttttcgtagtgtctgcaagtggacatttggagcgctttcaggcctgtggtggaaaacgaattatggtcacataaaaactggagagaagccttctcagaaacttctctgtgatgattgcattcaactcacagagttgaaccctcctatggatagagcagtgttgaaactctctttttgtggaatctgcaagtggatatgtggacctctccgaagatgtctttggaaacgggaatatcttcacataaaaactaaacagaagcattctcagaaacttcttggtgatgtttgcattcaaatcccagagttgaaccttcctttgatagttcaggtttgaaacactctttctgtaggatctgcaagtggctatttggaccactctgtggccttcgttcgaaacgggtatatcttcgcataaaatctagacagaagcattctcagaaaatactttgtgatgattgagtttaaatcacagagctgaacattcctttggatggagcaggtttgagacacactttttgtagaatctacaagtggatatttggacctctctgaggatttcgttggaaacgggataactgcacctaactaaacggaagcattctcagaaactgctttgtgatgattgcattcacctcacagagttgaacattcctattgatagagcagtttggaatcactcttgttgtggaatgtgcaagtggagatttggagcgctttgaggcctatggtagtaaagggaatagcttcatagaaaaactagacagatgcattctcaggaactttttggtgatgtttgtattcaactcccagagttgaactttcctttggaaagagcagctatgaaacactctttttctagaatctgcaagtggacgtttggagggctttgtggtttgtggtggaaaaggaaatatcttcacctaaatactagagagaagcattctcagaagcttctctgtgatgactgcattcaactcacggagttgaacactccttttgagagcgcagttttgaaactctctttctgtggcatctgcaaggggacatgtagacctctttgaagatttcgttggaaacggaatcatcttcacataaaaactatacagaaacagtctcagaatcttctttgtgatgtttgcattcaaatcccagagttgaactttcctttcaaagttcacgtttgaaacactctttttgcaggatctacaagtggatatttggaccactactgtgtccttcgttcgaaacgggtatatcttcacatgacatctagacagaagctttctcagaaaattctttgggatgattgagtggaactcacagagctgaacattccttgcgatgtagcagtttagaaacacactttctgcagaatctgcaagtgcatatttggacctctctgaggaattcgttggaaacgggataatttcagctgactaaacagaagcattctcagaaccttcttcgtgatgtctgcattcaactcacagtgtggaacctttctttgatagttcaggtttgaaacactctttttgtagaaactgcaaggggatcattgcactctttgaggagtaccgtagtaaaggaaataacttcctataaaaagaagacagaagaattctcagagccctcttcgtggtgtttgcattcaactcacagtgctgaacctttctttgatagtgcagctttgaaacactctttttgtagaaactgcaagtggatatttggtcctctctgaggatttcgttggaaacgggataaaccgcacagaactaaaacagaagcattctcagaaccttcttcgtgatgtttgcattcaactcacagtgttgaacctttctttgatagttcaggtttgaaacggtctttctgtagaaactgcaagtagatatttggacctctctgaggatttcgttggaaacgggataacccgcacagaactaaaacagaagcattcagagaaaactcttggtgacgactgagtttaactcacagagctgaacattcctttggatggagcagtttcgaaacacactatttgtagaatgtgcaagtggatatgtgggcctctctgaggatttcgttggaaacgggataaaccgcacagaactaaacggaagcattctcagaaactactttgtgatgattgcattcaagtcacagagttgaacattccctttgacagagcagtttggaaactctctttgtgtagaatctgcaagtggagatatggaccgctttgaggcctatggtagtaaaggaaatagcttcatataaaagctagacagtagcattctcagaaacttctttgtgatgcttgcattcaactcacagagttgaactttcctttcgagagagaagctttgaaacactctttttccagaatgtgcaagtggacatttggggagctttgaggcctgtggtggaaaaggaattatcttcccgtaaaagctagatagaagcattgtcagaaacttctttgtgatgattgcattcaactcacagagttgaaggttccttttcaaacagcagtttccaatcactctttctgtggaatctgcaagtggatatttgggcctctctgaggatttcgttggaaacgggataaaacgcacagaactaaaacagaagcattctcagaaacttctctgtgatgtttgtgttcaactcccagagtttcacgttgcttttcatagagtagttctgaaacatgcttttcgtagtgtctgcaagtggacatttggagcgctttcaggcctgtggtggaaaacgaattatggtcacataaaaactggagagaagccttctcagaaacttctctgtgatgattgcattcaactcacagagttgaaccctcctatggatagagcagtgttgaaactctctttttgtggaatctgcaagtggatatgtggacctctccgaagatgtctttggaaacgggaatatcttcacataaaaactaaacagaagcattctcagaaacttcttggtgatgtttgcattcaaatcccagagttgaaccttcctttgatagttcaggtttgaaacactctttctgtaggatctgcaagtggctatttggaccactctgtggccttcgttcgaaacgggtatatcttcgcataaaatctagacagaagcattctcagaaaatactttgtgatgattgagttgaactcacagagctgaacattcctttggatggagcaggtttgagacacactttttgtagaatctacaagtggatatttggacctctactgaggatttcattggaaacgggataactgcacctaactaaacggaagcattctcagaaactgctttgtgatgattgcattcacctcacagagttgaacattcctattgatagagcagtttggaaacactcttgttgtggaatgtgcaagtggagatttggagcgctttgaggcctatggtagtaaagggaatagcttcatagaaaaactagacagatgcattctcaggaactttttggtgatgtttgtattcaactcccagagttgaactttcctttggaaagagcagctatgaaacactctttttctagaatctgcaagtggacgtttggagggctttgtggtttgtggtggaaaaggaaatatcttcacctaaatactagatagaagcatcctcagaagcttctctgtgatgactgcattcaactcacggagttgaacactccttttgagagcgcagttttgaaactctctttctgtggcatctgcaaggggacatgtagacctctttgaagatttcgttggaaacggaatcatcttcacataaaaactacacagaagcagtctcagaatcttctttgtgatgtttgcattcaaatcccagagttgaactttcctttcaaagttcacgtttgaaacactctttttgcaggatctacaagtggatatttggaccactctgtgtccttcgttcgaaacgggtatatcttcacacgacatctagacagaagctttctcagaaaattctttgggatgattgagtggaactcacagagctgaacattccttgcgatgtagcagtttagaaacacactttctgcagaatctgcaagtgcatatttggacctctctgaggaattcgttggaaacgggataatttcagctgactaaacagaagcattctcagaacctccttcgtgatgtctgcattcaactcacagtgtggaacctttctttgatagttcaggtttgaaacactctttttgtagaaactgcaaggggataattgcacttctttgaggcctaccgtagtaaaggaaataacttcctatagaaagaagacagaagcattctcagaaccctcttcgtgatgtttgcattcaactcacagtgctgaacctttctttgatagttcagctttgaaacactcttcttgtagaaactgcaagtggatatttggtcctctctgaggatttcgttggaaacgggataaaccgcacagaactaaacagaagaattctcagagccctcttcgtgatgtttgcattcaactcacagtgctgaacctttctttgatagtgcagctttgaaacactctttttgtagaaactgcaagtggatgtttggtcctctctgaggatttcgttggaaacgggataaaccgcacagaactaaaacagaagcattctcagaaccttcttcgtgatgtttgcattcaactcacagtgttgaaccttcctttgatagttcaggtttgaaacggtctttctgtagaaactgcaagtagatatttggacctctctgaggatttcgttggaaacgggataaaccgcacagaactaaaacagaagcattcacagaaaactcttggtgacgactgagtttaactcacagagctgaacattcctttggatggagcagtttcgaaacacactatttgtagaatgtgcaagtggatatttgggcctctctgaggatttcgttggaaacgggataaaccgcacagaactaaacagaagcattctgagaaactactttgtgatgattgcattcaagtcacagagctgaacattccctttgacagagcagtttggaaactctctttgtgtagaatctgcaagtggagatatggaatgctttgaggacaatggtagtaaaggaaatagcttcatagacaagctagacagtagcattctcagaaacttctttgtgatgcttgcattcaactcacagagttgaactttcctttcgagagagaagctttgaaacactctttttccagaatctgcaagtggacatttggagggctttgaggcctgtggtggaaaaggaattatcttcccgtaaaagctggatagaagcattgtcagaaacttctttgtgatgattgcattcaactcacagagttgaaggttccttttcaaacagcagtttccaaacactctttctgtggaatctgcaagtggatgtttgggcctctttgaagatttcgttggaaacgggagaatcttcacagaaaagctaaacagaagcattctcagaaacttctctgtgatgtttgtgttcaactcccagagtttcacattgcttttcatagagtagttctgaaagatgcttttcgtagtctctacaattgggcatttggagcgctttcaggcctgtggtggaaaagaattatggtcacataaaaactggagagaagccttctcagaaacttctctgtgatgattgcattcaactcacagagttgaaccctcctatggatagagcagtgttgaaactctctttttgtggaatctgcaagtggatatgtggacctctccgaagatgtctttggaaactggaatatcttcacataaaaactaaacagaagcattctcagaaacttcttggtgatgtttgcattcaaatcccagagttgaaccttcctttgagagttcaggtttgaaacactctttttgtaggatctgcaagtggatatttggaccactctgtggccttcgttcgaaacgggtacatcttcgcataaaatctagacagaagcattctcagaaaatactttgtgatgattgagtttaactcacagagctgaacattcctttggatggagcaggtttgagacacactttttgtagaatctacaagtggatatttggacctctctgaggatttcgttggaaacgggataactgcacctaactaaacgggaagcattctcagaaactactttgtgatgattgcattcacctcacagagttgaacattcctattgagagagcagtttggaaacactcttgttggagaatctgcaagtggagatttggagcgctttgaggcctatggtagtaaagggaatatcttcatataaaaactagacagatgcattctcaggaactttttggtgatgtttgtattcaactcccagagttgaactttcctttggaaagagcagctatgaaacactctttttctagaatctgcaagtggacgtttggagggctttgtggtttgtggtggaaaaggaaatatcttcacctaaatactagatagaagcattctcagaagcttctctgtgatgactgcattcaactcacggagttgaacactccttttgagagcgcagttttgaaactctctttctgtggcatctgcaaggggacatgtagacctctttgaagatttcattggaaacggaatcatcttcacatcaaaactatacagaagcagtctcagaatcttctttgtgatgtttgcattcaaatcccagagttgaacttttctttccaagttcacgtttgaaacactctttttgcaggatctacaagtggatatttggaccactctgtgtccttcgttcgaaacgggtatatcttcacatgaaatctagacagaagctttctcagaaaattctttgggatgattgagttgagcaaacagagctgaacactccttgtgatgtagcagtttagaaacacactttctgcagaatctgcaagtgcatatgtggacctctctgaggaattcgttggaaacgggataatttcagctgactaaacagaagcattctcagaaccttcttcgtgatgtctgcattcaactcacagtgtggaacctttctttgatagttcaggtttgaaacactctttttgtagaaactgcaaggggataattgcacttctttgaggcctaccgtagtaaaggaaataacttcctatagaaagaagacagaagcattctcagaaccctcttcgtgatgtttgcattcaactcacagtgctgaacctttctttgatagttcagctttgaaacactcttcttgtagaaactgcaagtggatatttggtcctctctgaggatttcgttggaaacgggataaaccgcacagaactaaacagaagcattctcagaaccttcttcgtgatgtttgcattcaactcacagtgttgaacctttctttgatagttcaggttggaaacggtctttctgtagaaactgcaagtagatatttggacctctctgaggatttcgttggaaacgggataaaccgcacagaactaaaacagaagcattcacagaaaactcttggtgacgactgagtttaactcacagagctgaacattcctttggatggagcagtttcgaaacacactatttgtagaatctgcaagtggatatttgggcctctctgaggatttcgttggaaacgggataaaacgcacagaactaaaacagaagcattctgagaaactactttgtgatgattgcattcaagtcacagagctgaacattccctttgacagagcagtttggaaactctctttgtgtagaatctgcaagtggagatatggaatgctttgaggactatggtagtaaaggaaatagcttcatagacaagctagacagtagcattctcagaaacttctttgtgatgcttgcattcaactcacagagttgaactttcctttcgagagagaagctttgaaacactctttttccagaatctgcaagtggacatttggagggctttgaggcctgtggtggaaaaggaattatcttcccgtaaaagctagatagaagcattgtcagaaacttctttgtgatgattgcattcaactcacagagttgaaggttccttttcaaagagcagtttccaatcactctttctgtggaatctgcaagtggatatttcgacctattttgaagatttcgttggaaacgggataatcttcacagaaaagctaaacagaagcattctcagaaacttctctgtgatgtttgtgttcaactcccagagtttcacattgcttttcatagagtagttctgaaacatgcttttcgtagtgtctacaagtggacatttggagcgcttccaggcctgtggtggaaaacgaattatggtcacataaaaactggagagaagccttctcagaaacttctctgtgatgattgcattcaactcacagagttgaaccctcctatggatagagcagtgttgaaactctctttttgtggaacctgcaagtggatatgtggacctctccgaagatgtctttggaaacgggaatatcttcacataaaaactaaacagaagcattctcagaaacttcttggtgatgtttgcattcaaatcccagagttgaaccttcctttgacagttcaggtttgaaacactctttttgtaggatctgcaagtggatatttggaccactctgtggccttcgttcgaaacgggtacatcttcacataaaatctagacagaagcattctcagaaaatactttgtgatgattgagttgaactcacagagctgaacattcctttggatggagcaggtttgagacacactttttgtagaatctacaagtggatatttggacctctctgaggatttcgttggaaacggcataactgcacctaactaaacggaagcattctcagaaactgctttgtgatgattgcattcacctcacagagttgaccattcctattgatacagcagtttggaaaccctcttgttgtggaatgtgcaagtgcagatttggagcgctttgaggcctatggtagtaaagggaatagcttcatagaaaaactagacagatgcattctcgggaactttttggtgatgtttgtattcaactcccagagttgaactttcctttggaaagagcagctatgaaacactctttttctagaatctgcaagtggacgtttggagggctttgtggtttgtggtggaaaaggaaatatcttcacctcaatactagatagaagcattctcagaagcttctctgtgatgactgcattcaactcacggagttgaacactccttttgagagcgcagttttgaaactctgtttctgtggcatctgcaaggggacatgtagacctctttgaagatttcgttggaaacggaatcatcttcacatcaaaactatacagaagcagtctcagaatcttctttgtgatgtttgcattcaaatcccagagttgaactttcctttcaaagttcacgtttgaaacactctttttgcaggatctacaagtggatatttggaccactctgtgtccttcgttcgaaaagggtatatcttcacatgaaatctagacagaagctttctcagaaaattctttgggatgattgagttgaactcacagagctgaacattccttgcgatggagcagtttagaaacacactttctgcagaatctgcaagtgcatatttggacctctctgaggaattcgttggaaacgggataatttcagctgactaaacagaagcattctcagaaccttcttcgtgatgtctgcattcaactcacagtgtggaacctttctttgatagttcaggtttgaaacactctttttgtagaaactgcaaggggataattgcacttctttgaggcctaccgtagtaaaggaaataacttcctatagaaagaagacagaagcattctcagaaccctcttcgtgatgtttgcattcaactcacagtgctgaacctttctttgatagttcagctttgaaacactctttttgtaaaaactgcaagtgaatatttggtcctctctgaggatttcgttggaaacgggataaaacgcacagaactaaacagaagcattctcagaaccttcttcgtgatgtttgcattcaactcacagtgttgaacctttctttgatagttcaggtttgaaacggtctttctgtagaaactgcaagtagatatttggacctctctgaggatttcgttggaaacgggataaaccgcacagaactaaaacagaagcattcacagaaaactcttggtgacgactgagtttaactcacagagctgaacattcctttggatggagcagtttcgaaacacactatttgtagaatgtgcaagtggatatttgggcctctctgaggatttcgctggaaacgggataaaccgcacagaactaaacagaagcattctcagaaactactttgtgatgattgcattcaagtcacagagttgaacattccctttgacagagcagtttggaaactctctttgtgtagaatctgcaagtggagatatggaccgctttgaggcctatggtagtaaaggaaatagcttcatataaaagctagacagtagcattctcagaaacttctttgtgatgcttgcattcaactcacagagttgaactttcctttcgagagagaagctttgaaacactctttttccagaatctgcaagtggacatttggagggctttgaggcctgtggtggaaaaggaattatcttcccgtaaaagctagatagaagcattgtcagaaacttctttgtgatgattgcattcaactcacagagttgaaggttccttttcaaacagcagtttccaatcactcttcctgtggaatctgcaagtggatatttggacctctttgaagatttcgttggaaacgggagaatcttcacagaaaagctaaacagaagcatcctcagaaacttctctgtgatgtttgtgttcaactcccagagtttcacattgcttttcatagagtagttctgaaacatgcttttcgtagtgtctgcaagtggacatttggagcgctttcaggcctgtggtggaaaacgaattatggtcccataaaaactggagggaagccttctcagaaacttctctgtgatgattgcattcaactcacagatttgaaccctcctatggatagagcattgttgaaactctctttttgtggaatctgcaagtggatatgtggacctctccgaagatgtctttggaaacgggaatatcttcgcataaaaactaaacagaagcattctcagaaacttcttggtgatgtttgcattcaaatcccagagttgaaccttcctgtgatagttcaggtttgaaacactctttttgtaggatctgcaagtggatatttggaccactctgtggccttcgttcgaaacgggtacatcttcacataaaatctagacagaagcattctcagaaaatactttgtgatgattgagtttaactcacagagctgaacattcctttggatggagcaggtttgagacacactttttgtagaatctacaagtggatatttggacctctctgaggatttcgttggaaacgcgataactgcacctaactaaacggaagcattctcagaaactgctttgtgatgattgcattcacctcacagagttgaacattcctattgatagagcagtttggaaacactcttgttgtggaatgtgcaagtggagatttggagcgctttgaggcctatggtagtaaagggaatagcatcatagaaaaactagacagatgcattctcaggaactttttggtgatgtttgtattcaactcccagagttgaactttcctttggaaagagcagctatgaaacactctttttctagaatctgcaagtggacgtttggagggctttgtggtttgtggtggaaaaggaaatatcttcacctaaatactagatagaagcatcctcagaagcttctctgtgatgactgcattcaactcacggagttgaacactccttttgagagcgcagttttgaaactctctttctgtggcatctgcaaggggacatgtagacctctttgaagatttcgttggaaacggaatcatcttcacataaaaactacacagaagcagtctcagaatcttctttgtgatgtttgcattcaaatcccagagttgaactttcctttcaaagttcacgtttgaaacactctttttgcaggatctacaagtggatatttggaccactctgtgtccttcgttcgaaacgggtatatcttcacacgacatctagacagaagctttctcagaaaattctttgggatgattgagtggaactcacagagctgaacattccttgcgatgtagcagtttagaaacacactttctgcagaatctgcaagtgcatatttggacctctctgaggaattcgttggaaacgggataatttcagctgactaaacagaagcattctcagaaccttcttcgtgatgtctgcattcaactcacagtgtggaacctttctttgatagttcaggtttgaaacactctttttgtggaaactgcaaggggataattgcacttctttgaggcctaccgtagtaaaggaaataacttcctataaaaagaagacagaagcattctcagaaccctcttcgtgatgtttgcattcaactcacagtgctgaacctttctttgatagttcagctttgaaacactcttcttgtagaaactgcaagtggatatttggtcctctctgaggatttcgttggaaacgggataaaccgcacagaactaaacagaagcattctcagaaccttcttcgtgatgtttgcattcaactcacagtgttgaacctttctttgatagttcaggtttgaaacggtctttctgtagaaactggaagtagatatttggacctctctgaggatttcgttggaaacgggataaaccgcacagaactaaaacagaagcattcacagaaaactcttggtgacgactgagtttaactcacagagctgaacattcctttggatggagcagtttcgaaacacactatttgtagaatgtgcaagtggatatgtgggcctctctgaggatttcgttggaaacgggataaaccgcacagaactaaacagaagcattctcagaaactactttgtgatgattgcattcaagtcacagagttgaacattccctttgacagagcagtttggaaactctctttgtgtagaatctgcaagtggagatatggaccgctttgaggcctatggtagtaaaggaaatagcttcatataaaagctagacagtagcattctcagaaacttctttgtgatgcttgcattcaactcacagagttgaactttcctttcgagagagaagctttgaaacactctttttccagaatctgcaagtggacatttggagggctttgaggcctgtggtggaaaaggaattatcttcccgtaaaagctagatagaagcattgtcagaaacttctttgtgatgattgcattcaactcacagagttgaaggttccttttcaaacagcagtttccaatcactctttctgtggaatctgcaagtggatatttgggcctctctgaggatttcgttggaaacgggataaaacgcacagaactaaaacagaagcattctcagaaacttctctgtgatgtttgtgttcaactcccagagtttcacgttgcttttcatagagtagttctgaaacatgcttttcgtagtgtctgcaagtggacatttggagcgctttcaggcctgtggtggaaaacgaattatggtcacataaaaactggagagaagccttctcagaaacttctctgtgatgattgcattcaactcacagagttgaaccctcctatggatagagcagtgttgaaactctctttttgtggaatctgcaagtggatatgtggacctctccgaagatgtctttggaaacgggaatatcttcacataaaaactaaacagaagcattctcagaaacttcttggtgatgtttgcattcaaatcccagagttgaaccttcctttgatagttcaggtttgaaacactctttctgtaggatctgcaagtggctatttggaccactctgtggccttcgttcgaaacgggtatatcttcgcataaaatctagacagaagcattctcagaaaatactttgtgatgattgagtttaaatcacagagctgaccattcctttggatggagcaggtttgagacacactttttgtagaatctacaagtggatatttggacctctctgaggatttcgttggaaacgggataactgcacctaactaaacggaagcattctcagaaactgctttgtgatgattgcattcacctcacagagttgaacattcctattgatagagcagtttggaaacactcttgttgtggaatgtgcaagtggagatttggagcgctttgaggcctatggtagtaaagggaatagcttcatagaaaaactagacaggatgcattctcaggaactttttggtgatgtttgtattcaactcccagagttgaactttcctttggaaagagcagctatgaaacactctttttctagaatctgcaagtggacgtttggagggctttgtggtttgtggtggaaaaggaaatatcttcacctaaatactagatagaagcatcctcagaagcttctctgtgatgactgcattcaactcacggagttgaacactccttttgagagcgcagttttgaaactctctttctgtggcatctgcaaggggacatgtagacctctttgaagatttcgttggaaacggaatcatcttcacataaaaactatacagaagcagtctcagaatcttctttgtgatgtttgcattcaaatccccgagttgaactttcctttcaaagttcacgtttgaaacactctttttgcaggatctacaagtggatatttggaccactctgtgtccttcgttcgaaacgggtatatcttcacatgacatctagacagaagctttctcagaaaattctttgggatgattgagttgaactcacagaggtgagcattccttgcgatgtagcagtttagaaacacactttctgcagaatctgcaagtgcatatttggacctctgtgaggaattcgttggaaacgggataatttcagctgactaaacagaagcattctcagaaccttcttcgtgatgtctgcattcaactcacagtgtggaacctttccttgatagttcaggtttgaaacactctttttgtagaaactgcaaggggataattgcacttctttgaggcctaccgtagtaaaggaaataacttcctatacaaagaagacagaagcattctcagaaccctcttcgtgatgtttgcattcaactcacagtgctgaacctttctttgatagttcagctttgaaacactctttttgtagaaactgcaaggggatatttggtcctctctgaggatttcgttggaaacgggataaaccgcacagaactaaacagaagcattctcagaaccttcttcgtgatgtttgcattcaactcacagtgttgaacctttctttgatagttcaggtttgaaacggtctttgtgtagagactgcaagtagatatttggacctctctgaggatttcgttggaaacgggataaaccgcacagaactaaaacagaagcattcacagaaaactcttggtgacgactgagtttaactcacagagctgaacattcctttggatggagcagtttcgaaacacactatttgtagaatgtgcaagtggatatttgggcctctctgaggatttcgttggaaacgggataaaccgcacagaactaaacagaagcattctcagaaactactttgtgatgattgcattcaagtcacagagttgaacattccctttgacagagcagtttggaaactctctttgtgtagaatctgcaagtggagatatggaccgctttgaggcctatggtagtaaaggaaatagcttcatataaaagctagacagtagcattctcagaaacttctttgtgatgcttgcattcaactcacagagttgaactttcctttcgagagagaagctttgaaacactctttttccagaatctgcaagtggacatttggagggctttgaggcctgtggtggaaaaggaattatcttcccgtaaaagctagatagaagcattgtcagaaacttctttgtgatgattgcattcaactcacagagttgaaggttccttttcaaacagcagtttccaatcactctttctgtggaatctgcaagtggatatttgggcctctctgaggatttcgttggaaacgggataaaacgcacagaactaaaacagaagcattctcagaaacttctctgtgatgtttgtgttcaactcccagagtttcacgttgcttttcatagagtagttctgaaacatgcttttcgtagtgtctgcaagtggacatttggagcgctttcaggcctgtggtggaaaacgaattatggtcacataaaaactggagagaagccttctcagaaacttctctgtgatgattgcattcaactcacagagttgaaccctcctatggatagagcagtgttgaaactctctttttgtggaatctgcaagtggatatgtggacctctccgaagatgtctttggaaacgggaatatcttcacataaaaactaaacagaagcattctcagaaacttcttggtgatgtttgcattcaaatcccagagttgaaccttcctttgatagttcaggtttgaaacactctttttgtaggatctgcaagtggatatttggaccactctgtggccttcgttcgaaacgggtatatcttcgcataaaatctagacagaagcattctcagaaaatactttgtgatgattgagtttaactcacagagctgaacattcctttggatggagcaggtttgagacacactttttgtagaatctacaagtggatatttggacctctctgaggatttcgttggaaacgcgataactgcacctaactaaacggaagcattctcagaaactgctttgtgatgattgcattcacctcacagagttgaacattcctattgatagagcagtttggaaacactcttgttgtggaatgtgcaagtggagatttggagcgctttgaggtctatggtagtaaagggaatagcttcatagaaaaactagacagatgcattctcaggaactttttggtgatgtttgtattcaactcccagagttgaactttcctttggaaagagcagctatgaaacactctttttctagaatctgcaagtggacgtttggagggctttgtggtttgtggtggaaaaggaaatatcttcacctaaatactagatagaagcattctcagaagcttctctgtgatgactgcattcaactcacggagttgaacactccttttgagagcgcagttttgaaactctctttctgtggcatctgcaaggggacatgtagacctctttgaagatttcgttggaaacggaatcatcttcacataaaaactatacagaagcagtctcagaatcttctttgtgatgtttgcattcaaatcccagagttgaactttcctttcaaagttcacgtttgaaacactctttttgcaggatctacaagtggatatttggaccactctgtgtccttcgttcgaaacgggtatatcttcacatgacatctagacagaagctttctcagaaaattctttgggatgattgagttgaactcacagagctgaacattccttgcgatggagcagtttagaaacacactttctgcagaatctgcaagtgcatatttggacctctctgaggaattcgttggaaacgggttaatttcagctgactaaacagaagcattctcagaaccttcttcgtgatgtctgcattcaactcacagtgtggaacctttctttgatagttcaggtttgaaacactctttttgtagaaactgcaaggggataattgcacttctttgaggcctaccgtagtaaaggaaataacttcctatagaaagaagacagaagaattctcagagccctcttcgtgatgtttgcattcaactcacagtgctgaacctttctttgatagtgcagctttgaaacactctttttgtagaaactgcaagtggatgtttggtcctctctgaggatttcgttggaaacgggataaaccgcacagaactaaaacagaagcattctcagaaccttcttcgtgatgtttgcattcaactcacagtgttgaacctttctttgatagttcaggtttgaaacggtctttctgtagaaactgcaagtagatatttggacctctctgaggatttcgttggaaacgggataacccgcacagaactaaaacagatagcattcacagtaaaactcttggtgacgactgagtttaactcacagagctgaacattcctttggatggagcagtttcgaaacacactatttgtagaatctgcaagtggatatttgggcctctctgaggatttcgttggaaacgggataaaacgcacagaactaaaacagaagcattctcagaaactactttgtgatgattgcattcaagtcacagagttgaacattcccttcgacagagcagtttggaaactctctttgtgtataatctgcaagtggagatatggaccgctttgaggcctatggtagtaaaggaaatagcttcatataaaagctagacagtagcattctcagaaacttctttgtgatgcttgcattcaactcacagagttgaactttcctttcgagagagaagctttgaaacactctttttccagaatctgcaagtggacatttggagggctttgaggcctgtggtggaaaaggaattatcttcccgtaaaagctagatagaagcattgtcagaaacttctttgtgatgattgcattcaactcacagagttgaaggttccttttcaaagagcagtttccaatcactctttctgtggaatctgcaagtggatatttcgacctctttgaagatttcgttggaaacgggagaatcttcacagaaaagctaaagagaagcattctcagaaacttctctgtgatgtttgtgttcaactcccagagtttcacattgcttttcatagagtagttctgaaacatgcttttcgtagtgtctgcaagtggacatttggagcgctttcaggcctgtggtggaaaacgaattatggtcacataaaaactggagagaagccttctcagaaacttctctgtgatgattgcattcaactcacagagttgaaccctcctatggatagagcagtgttgaaactctctttttgtggaatctgcaagtggatatgtggacctctccgaagatgtctttggaaacgggaatatcttcacataaaaactaaacagaagcattctcagaaacttcttggtgatgtttgcattcaaatcccagagttgaaccttcctttgatagttcaggtttgaaacactctttctgtaggatctgcaagtggctatttggaccactctgtggccttcgttcgaaacgggtatatcttcgcataaaatctagacagaagcattctcagaaaatactttgtgatgattgagtttaaatcacagagctgaccattcctttggatggagcaggtttgagacacactttttgtagaatctacaagtggatatttggacctctctgaggatttcgttggaaacgggataactgcacctaactaaacggaagcattctcagaaactgctttgtgatgattgcattcacctcacagagttgaacattcctattgatagagcagtttggaaacactcttgttgtggaatgtgcaagtggagatttggagcgctttgaggcctatggtagtaaagggaatagcttcatagaaaaactagacagatgcattctcaggaaccttttggtgatgtttgtattcaactcccagagttgaactttcctttggaaagagcagctatgaaacactctttttctagaatctgcaagtggacgtttggagggctttgtggtttgtggtggaaaaggaaatatcttcacctaaatactagatagaagcattctcagaagcttctctgtgatgactgcattcaactcacggagttgaacactccttttgagagcgcagttttgaaactctctttctgtggcatctgcaaggggacatgtagacctctttgaagatttcgttggaaacggaatcatcttcacataaaaactatacagaagcagtctcagaatcttctttgtgatgtttgcattcaaatcccagagttgaactttcctttcaaagttcacgtttgaaacactctttttgcaggatctacaagtggatatttggaccactctgtgtccttcgttcgaaacgggtatatcttcacatgacatctagacagaagctttctcagaaaattctttgggatgattgagttgaactcacagagctgaacattcctttgaatggagcaggtttgagacacactttttgtagaatctacaagtggatatttggacctctctgaggatttcgttggaaacgggataactgcacataactaaacggaagcattctcagaaccttcttcgtgatgtctgcattcaactcacagtgtggaacctttctttgatagttcaggtttgaaacactctttttgtagaaactgcaaggggataattgcacttctttgaggcctaccgtagcaaaggaaataacttattataaaaagaagacagaagcattctcagaaccctcttcgtgatgtttgcattcaactcacagtgctgaacctttctttgatagttcagctttgaaacactcttcttgtagaaactgcaagtggatatttggtcctctctgaggatttcgttggaaacgggataaaccgcacagaactaaacagaagcattctcagaaccttcttcgtgatgtttgcattcaactcacagtgttgaacctttctttgatagttcaggtttgaaacggtctttctgtagaaactgcaagtagatatttggaccgctctgaggatttcgttggaaacgggataacccgcacagaactaaaacagaagcattcacagaaaagtcttggtgacgactgagtttaactcacagagctgaacattcctttggatggagccgtttcgaaacacactatttgtagaatgtgcaagtggatatttgggcctctctgaggatttcgttggaaacgggataaaccgcacagaactaaacagaagcattctcagaaactactttgtgatgattgcattcaagtcacagagttgaacattccctttgacagagcagtttggaaactctctttgtgtagaatctgcaagtggagatatggaccgctttgaggcctatggtagtaaaggaaatagcttcatataaaagctagacagtagcattctcagaaacttctttgtgatgcttgcattcaactcacagagttgaactttcctttcgagagagaagccttgaaacactctttttccagaatctgcaagtggacatttggagggctttgaggcctgtggtggaaaaggaattatcttcccgtaaaagctagatagaagcattgtcagaaacttctttgtgatgattgcattcaactcacagagatgaaggttcctttacaaacagcagtttccaaacactctttctgtggaatctgcaagtggatatttggacctctttgaagatttcgttggaaacgggagaatcttcacagaaaagctaaacagaagcattctcagaaacttctctgtgatgtttgtgttcaactcccagagtttcacattgcttctcatagagtagttctgaaacatgcttttcgtagtgtctgcaagtggacatttggagcgctttcaggcctgtggtggaaaacgaattatggtcacataaaaactggagagaagccttctcagaaacttctctgtgatgattgcattcaactcacagagttgaaccctcctatggatagagcagtgttgaaactctctttttgtggaatctgcaagtggatatgtggacctctccgaagatgtctttggaaacgggaatatcttcacataaaaactaaacagaagcattctcagaaacttcttggtgatgtttgcattcaaatcccagagttgaaccttcctttgatagttcaggtttgaaacactctttttgtaggatctgcaagtggctatttggaccactctgtggccttcgttcgaaacgggtatatcttcgcataaaatctagacagaagcattctcagaaaatactttgtgatgattgagtttaactcacagagctgaacattcctttggatggagcaggtttgagacacactttttgtagaatctacaagtggatatttggacctctctgaggatttcgttggaaacgggataactgcacctaactaaacggaagcattcccagaaactgctttgtgatgattgcattcacctcacagagttgaacattcctattgatagagcagtttggaaacactcttgttgtggaatgtgcaagtggagatttggagcgttttgagacctatggtagtaaagggaatagcttcatagaaaaactagacagatgcattctcaggaactttttggtgatgtttgtattcaactcccagagttgaactttcctttggaaagagcagctatgaaacactctttttctagaatctgcaagtggacgtttggagggctttgtggtttgtggtggaaaaggaaatatcttcacctaaatactagatagaagcattctcagaagcttctctgtgatgactgcattcaactcacggagttgaacactccttttgagagcgcagttttgaaactctctttctgtggcatctgcaaggggacatgtagacctctttgaagatttcgttggaaacggaatcatcttcacataaaaactatacagaagcagtctcagaatcttctttgtgatgtttgcattcaaatcccaggagttgaactttcctttcaaagttcacgtttgaaacactctttttgcaggatctacaagtggatatttggaccactctgtgtccttcgttcgaaacgggtataacttcacacgacatctagacagaagctttctcagaaaattctttgggatgattgagttgagcaaacagagctgaacattccgtgcgatgtagcagtttagaaacacactttctgcagaatctgcaagtgcatatgtggacctctctgaggaattcgttggaaacgggataatttcagctgactaaacagaagcattctcagaaccttcttcgtgatgtctgcattcaactcacagtgtggaacctttctttgatagttcaggtttgaaacactctttttgtagaaactgcaaggggatccttgcacttctttgaggcctaccgtagtaaaggaaataacttcctataaaaagaagacagaagcattctcagaaccctcttcgtgatgtttgcattcaactcacagtgctgaacctttctttgatagttcagctttgaaacactcttcttgtagaaactgcaagtggatatttggtcctctctgaggatttcgttggaaacgggataaaccgcacagaactaaacagaagcattctcagaaccttcttcgtgatgtttgcattcaactcacagtgttgaacctttctttgatagttcaggtttgaaacggtctttctgtagaaactgcaagtagatatttggaccactttgaggatttcgttggaaacgggataaaccgcacagaactaaaacagaagcattcacagaaaactcttggtgacgactgagtttaactcacagagctgaacattcctttggatggagcagtttcgaaacacactatttgtagaatctgcaagtggatatttgggcctctctgaggatttcgttggaaacgggataaaacgcacagaactaaaacagaagcattctcagaaactactttgtgatgattgcattcaagtcacagagttgaacattccctttgacagagcagtttggaaactctctttgtgtagaatctgcaagtggagatatggaccgctttgaggcctatggtagtaaaggaaatagcttcatataaaagctagacagtagcattctcataaacttctttgtgatgcttgcattcaactcacagagttgaactttcctttcgagagagaagctttgaaacactctttttccagaatctgcaagtggacatttggagggttttgaggcctgtggtggaaaaggaattatcttcccgtaaaagctagatagaagcattgtcagaaacttctttgtgatgattgcattcaactcacagagttgaaggttccttttcaaacagcagtttccaatcactctttctgtggaatctgcaagtggatatttgggcctctctgaggatttcgttggaaacgggataaaacgcacagaactaaaacagaagcattctcagaaacttctctgtgatgtttgtgttcaactcccagagtttcacgttgcttttcatagagtagttctgaaacatgcttttcgtagtgtctgcaagtggacatttggagcgctttcaggcctgtggtggaaaacgaattatggtcacataaaaactggagagaagccttctcagaaacttctctgtgatgattgcattcaactcacagatttgaaccctcctatggatagagcattgttgaaactctctttttgtggaatctgcaagtggatatgtggacctctccgaagatgtctttggaaacgggaatatcttcacataaaaactaaacagaagcattctcagaaacttcttggtgatgtttgcattcaaatcccagagttgaaccttcctttgatagttcaggtttgaaacactctttttgtaggatctgcaaggggctatttggaccactctgtggccttcgttagaaacgggtacatcttcgcataaaatctagacagaagcattctcagaaaatactttgtgatgattgagtttaactcacagagctgaacattcctttggatggagcaggtttgagacacactttttgtagaatgtacaagtggatatttggacctctctgaggatttcgttggaaacgggataactgcacctaactaaacggaagcattctcagaaactgctttgtgatgattgcattcacctcacagagttgaacattcctactgatagagcagtttggaaacactcttgttgtggaatgtggaagtggagatttggagcgctttgaggcctatggtagtaaagggaatagcttcatagaaaaactagacagatgcattctcaggaactttttggtgatgtttgtattcaactcccagagttgaactttcctttggaaagagcagctatgaaacactctttttctagaatctgcaagtggacgtttggagggctttgtggtttgtggtggaaaaggaaatatcttcacctaaatactagatagaagcattctcagaagcttctctgtgatgactgcattcaactcacggagttgaacactccttttgagagcgcagttttgaaactctctttctgtggcatctgcaaggggacatgtagacctctttgaagatttcgttggaaacggaatcatcttcacataaaaactatacagaagcagtctcagaatcttctttgtgatgtttgcattcaaatcccagagttgaactttcctttcaaagttcatgtttgaaacactctttttgcaggatctacaagtggatatttgtaccactctgtgtccttcgttcgaaacgggtatatcttcacatgacatctagacagaagctttctcagaaaattctttgggatgattgagttgagcaaacagagctgaacactccttgcgatgtagcagtttagaaacaccctttctgcagaatctgcaagtgcatatgtggacctctctgaggaattcgttggaaacgggataatttcagctgactaaacagaagcattctcagaaccttcttcgtgatgtctgcattcaactcacagtgtggaacctttctttgatagttcaggtttgaaacactctttttgtagaaactgcaaggggataattgcacttctttgaggcctaccgtagtaaaggaaataacttcctataaaaagaagacagaagcattctcagaaccctcttcgtgatgtttgcattcaactcacagtgctgaacctttctttgatagttcagctttgaaacactctttttgtagaaactgcaagtggatatttggtcctctctgaggatttcgttggaaacgggataaaccgcacagaactaaacagaagcattctcagaaccttcttcgtgatgtttgcattcaactcacagtgttgaacctttctttgatagttcaggtttgaaacggtctttctgtagaaactgcaagtagatatttggacctctctgaggatttcgttggaaacgggataaaccgcacagaactaaaacagaagcattcacagaaaactcttggtgacgactgagtttaactcacagagctgaacattcctttggatggagcagtttcaaaacacactatttgtagaatctgctagtggatatgtgggcctctctgaggatttcgttggaaacgggataaaccgcacagaactaaaacagaagcattctcagaaactactttgtgatgattgcattcaagtcacagagctgaacattccctttcacagagcagtttggaaactctctttgtgtagaatctgcaagtggagatatggaatgctttgaggactatggtagtaaaggaaatagcttcatataaaagctagacagtagcattctcagaaacttctttgtgatgcttgcattcaactcacagagttgaactttcctttcgagagagaagctttgaaacactctttttccagaatctgcaagtggacatttggagggctttgaggcctgtggtggaaaaggaattatcttcccgtaaaagctagatagaagcattgtcagaaacttctttgtgatgattgcattcaactcacagagttgaaggttccttttcaaagagcagtttccaatcactctttgtgtggaatctgcaagtggatatttggacctattttgaagatttcgttggaaacgggagaatcttcacaggaaagctaaacagaagcattctcagaaacttctctgtgatgtttgtgttcaactcccagagtttcacgttgcttttcatagagtagttctgaaacatgcttttcgtagtgtctgcaagtggacatttggagcgctttcaggcctgtggtggaaaacgaattatggtcacataaaaactggagagaagccttctcagaaacttctctgtgatgattgcattcaactcacagagttgaaccctcctatggatagagcagtgttgaaactctctttttgtggaatctgcaagtggatatgtggacctctccgaagatgtctttggaaacgggaatatcttcacataaaaactaaacagaagcattctcagaaacttcttggtgatgtttgcattcaaatcccagagttgaaccttcctttgagagttcaggtttgaaacactctttttgtaggatctgcaagtggatatttggaccactctgtggccttcgttcgaaacgggtacatcttcgcataaaatctagacagaagcattctcagaaaatactttgtgatgattgagtttaaatcacagagctgaccattcctttggatggagcaggtttgagacacactttttgtagaatctacaagtggatatttggacctctctgaggatttcgttggaaacgggataactgcacctaactaaacggaagcattctcagaaactgctttgtgatgattgcattcacctcacagagttgaacattcctattgatagagcagtttggaaacactcttgttgtggaatgtgcaagtggagatttggagcgctttgaggcctatggtagtaaagggaatagcttcatagaaaaactagacagatgcattctcaggaactttttggtgatgtttgtattcaactcccagagttgaactttcctttggaaagagcagctatgaaacactgtttttctagaatctgcaagtggacgtttggagggctttgtggtttgtggtggaaaaggaaatatcttcacctaaatactagatagaagcattctcagaagcttctctgtgatgactgcattcaactcacggagttgaacactccttttgagagcgcagttttgaaactctctttctgtggcatctgcaaggggacatgtagacctctttgaagatttcgttggaaacggaatcatcttcacataaaaactatacagaagcagtctcagaatcttctttgtgatgtttgcattcaaatcccagagttgaacttgcctttcaaagttcacgtttgaaacactctttttgcaggatctacaagtggatatttggaccactctgtgtccttcgttcgaaacgggtatatcttcacatgacatctagacagaagctttctcagaaaattctttgggatgattgagtggaactcacagagctgaacattccttgcgatgtagcagtttagaaacacactttctgcagaatctgcaagtgcatatttggacctctctgaggaattcgttggaaacgggataatttcagctgactaaacagaagcattctcagaaccttcttcgtgatgtgtgcattcaactcacagtgtggaacctttctttgatagttcaggtttgaaacactctttttgtagaaactgcaaggggataattgcacttctttgaggcctaccgtagtaaaggaaataacttcctatagaaagaagacagaagaattctcagagccctcttcgtgatgtttgcattcaactcacagtgctgaacctttctttgatagtgcagctttgaaacactctttttgtagaaactgcaagtggatgtttggtcctctctgaggatttcgttggaaacgggataaaccgcacagaactaaaacagaagcattctcagaaccttcttcgtgatgtttgcattcaactcacagtgttgaacctttctttgatagttcaggtttgaaacggtctttctgtagaaactgcaagtagatatttggacctctctgaggatttcgttggaaacgggataacccgcacagaactaaaacagaagcattcacagaaaactcttggtgacgactgagtttaactcacagagctgaacattcctttggatggagcagtttcgaaacacactatttgtagaatgtgcaagtggatatttaggcctctctgaggatttcgttggaaacgggataaaccgcacagaactaaacagaagcattctcagaaactactttgtgatgattgcattcaagtcacagagttgaacattccctttgacagagcagtttggaaactctctttgtgtagaatctgcaagtggagatatggaccgctttgaggcctatggtagtaaaggaaatagcttcatataaaagctagacagtagcattctcagaaacttctttgtgatgcttgcattcaactcacagagttgaactttcctttcgagagagaagctttgaaacactctttttccagaatgtgcaagtggacatttggggagctttgaggcctgtggtggaaaaggaattatcttcccgtaaaagctagatagaagcattgtcagaaacttctttgtgatgattgcattcaactcacagagttgaaggttccttttcaaacagcagtttccaatcactctttctgtggaatctgcaagtggatatttgggcctctctgaggatttcgttggaaacgggataaaacgcacagaactaaaacagaagcattctcagaaacttctctgtgatgtttgtgttcaactcccagagtttcacgttgcttttcatagagtagttctgaaacatgcttttcgtagtgtctgcaagtggacatttggagcgctttcaggcctgtggtggaaaacgaattatggtcacttaaaaactggagagaagccttctcagaaacttctctgtgatgattgcattcaactcacagagttgaaccctcctatggatagagcagtgttgaaactctctttttgtggaatctgcaagtggatatgtggacctctccgaagatgtctttggaaacgggaatatcttcacataaaaactaaacagaagcattctcagaaacttcttggtgatgtttgcattcaaatcccagagttgaaccttcctttgatagttcaggtttgaaacactctttctgtaggatctgcaagtggctatttggaccactctgtggccttcgttcgaaacgggtatatcttcgcataaaatctagacagaagcattctcagaaaatactttgtgatgattgagttgaactcacagagctgaacattcctttggatggaacaggattaagacaaactttttgtagaatctacaagtggatatttggacctctctgaggatttcgttggaaacgggataactgcacctaactaaacggaagcattctcagaaactgctttgtgatgattgcattcacctcacagagttgaacattcctattgatagagcagtttggaaacactcgtgttgtggaatgtgcatgtggagatttggagcgctttgaggcctatggtagtaaagggaatagcttcatagaaaaactagacagatgcattctcaggaactttttggtgatgtttgtattcaactcccagtgttgaactttcctttggaaagagcagctatgaaacactctttttctagaatctgcaagtggacgtttggagggctttgtggtttgtggtggaaaaggaaatatcttcacctaaatactagatagaagcattctcagaagcttctctgtgatgactgcattcaactcacggagttgaacactccttttgagagcgcagttttgaaactctctttctgtggcatctgcaaggggacatgtagacctctttgaagatttcgttggaaacggaatcatcttcacataaaaactatacagaagcagtctcagaatcttctttgtgatgtttgcattcaaatcccagagttgaactttcctttcaaagttcacgtttgaaacactctttttgcaggatctacaagtggatatttggaccactctgtgtccttcgttcgaaacgggtatatcttcacatgacatctagacagaagctttctcagaaaattctttgggatgattgagtggaactcacagagctgaacattccttgcgatggagcagtttagaaacacactttctgcagaatctgcaagtgcatatttggacctctctgaggaattcgttggaaacgggataatttcagctgactaaacagaagcattctcagaaccttcttcgtgatgtctgcattcaactcacagtgtggaacctttctttgatagttcaggtttgaaacactctttttgtagaaactgcaaggggataattgcacttctttgaggcctaccgtagtaaaggaaataacttcctattgaaagaagacagaagcattctcagaaccttcttcgtgatgtttgcattcaactcacagtgttgaacctttctttgatagttcaggtttgaaacggtctttctgtagaaactgcaagtagatatttggacctctctgaggatttcgttggaaacgggataaaccgcacagaactaaacagaagcattcacagaaaactcttggtgacgactgagtttaacccacagagctgaacattcctttggatggagcagtttcgaaacacactatttgtagaatgtgcaagtggatatttgggcctctctgaggattttgttggaaacgggataaactgcccagaactaaacagaagcattctcagaaactactttgtgatgattgcattcaagtcacagagttgaacattccctttgacagagcagtttggaaactctctttgtgtagaatctgcaagtggagatatggaccgctttgaggcctatggtagtaaaggaaatagcttcatataaaagctagacagtagcattctcagaaacttctttgtgatgcttgcattcaactcacagagttgaactttcctttcgagagagaagctttgaaacactctttttccagaatctgcaagtggacatttggagggctttgaggcctgtggtggaaaaggaattatcttcccgtaaaagctagatagaagcattgtcagaaacttctttgtgatgattgcattcaactcacagagttgaaggttccttttcaaacagcagtttccaaacaccctttctgtggaatctgcaagtggatgtttggacctcttggaagatttcgttggaaacgggagaatcttcacataaaagctaaacagaagctttctcagaaacttctctgtgatgtttgtgttcaactcccagagtttcacattgcttttcatagagtagttctgaaacatgcttttcgtagtgtctgcaagtggacgtttggagcgctttcaggccagtggtggaaaacgaattatggtcacaaaaaaactggagagaagccttctcagaaacttctctgtgatgattgcattcaactcacagagttgaaccctccaatggatagagcagtgttgaaattctctttttgtggaatctgcaagtggatatgtggacctctccgaagatgtctttggaaacgggaatatcttcacataaaaactaaacagaagcattctcagaaacttcttggtgatgtttgcattcaaatcccagagttgaaccttcctttgatagttcaggtttgaaacactctttttgtaggatctgcaagtggatatttggaccactctgtggccttcgttcgaaacgggtacatcttcgcaaaaaatctagacagaagcattctcagaaaatactttgtgatgattgagttcaactcacagagctgaacattccttcggatggagcaggtttgagacacactttttgtagaatctacaagtggatatttggacctctctgaggatttcgttggaaacaggataactgcacctaactaaacggaagcattctcagaaactgctttgtgatgattgcattcacctcacagagttgaacattcctattgatagagcagtttggaaacactcttgttgtggaatgtgcaagtggagatttggagcgctttgaggcctatggtagtaaagggaatagcttcatagaaaaactagacagatgcattctcaggaaccttttggtgatgtttgtattcaactcccagagttgaactttcctttggaaagagcagctatgaaacactctttttctagaatctgcaagtggacgtttggagggctttgtggtttgtggtggaaaaggaaatatcttcacctaaatactagatagaagcattctcagaagcttctctgtgatgactgcattcaactcacggagttgaacactccttttgagagcgcagttttgaaactctctttctgtggcatctgcaaggggacatgtagacctctttgaagatttcgttggaaacggaatcatcttcacataaaaactatacagaagcagtctcagaatcttctttgtgatgtttgcattcaaatcccagagttgaactttcctttcaaagttcacgtttgaaacactctttttgcaggatctacaagtggatatttggaccactctgtgtcctccgttcgaaacgggtatatcttcacatgacatctagacagaagctttctcagaaaattctttgggatgattgagtggaactcacagagctgaacattccttgtgatgtagcagtttagaaacacactttctgcagaatctgcaagtgcatatgtggacctctctgaggaattcgttggaaacgggataatttcagctgactaaacagaagcattctcagaaccttcttcgtgatgtctgcattcaactcacagtgtggaacctttctttgatagttcaggtttgaaacactctttttgtagaaactgcaaggggataattgcacttctttgaggcctaccgtagtaaaggaaataacttcctatagaaagaagacagaagaattctcagagccctcttcgtgatgtttgcattcaactcacagtgctgaacctttctttgatagtgcagctttgaaacactctttttgtagaaactgcaagtggatgtttggtcctctctgaggatttcgttggaaacgggataaaccgcacagaactaaaacagaagcattctcagaaccttcttcgtgatgtttgcattcaactcacagtgttgaacctttctttgatagttcaggtttgaaacggtctttctgtagaaactgcaagtagatctttggacctctctgaggatttcgttggaaacgggataacccacacagaactaaaacagaagcattcacagaaaactcctggtgacgactgagtttaactcacagagctgaacattcccttggttggagcagtttcgaaacacactgtttgtagaatctgcaggtggatgtttgggcctctctgaggatttcgttggaaacgggataaacggcagagaactaaaacagaagcattctcagaaactactttgtgatgattgcattcaagtcacagatttgaacattccctttgacggagcagtttggaaactctctttgtgtagaatctgcaagtggagatatggaatgctttgaggactatggtagtaaaggaaatagcttcatataaaagctagacagtagcattctcagaaacttctttgtgatgcttgcattcaactcacagagttgaactatcctttcgagagagaagctttgaaatactctttttccagaatctgcaagtggacatttggagggctttgaggcctgtggtggaaaaggaattatcttcctgtaaaagctagatagaagcattgtcagaaacttctttgtgatgattgcattcaactcacagagatgaaggttcctttacaatcagcattttccaaacactctttctgtggaatctgcaagtggatatttggacctctttgaagatttcgttggaaacgggagaatcttcacagaaaagctaaacagaagcattctcagaaacttctctgtgatgtttgtgttcaactcccagagtttcacattgcttttcatagagtagttctgaaacatgcttttcgtagtgtctgcaagtggacatttggagcgctttcaggcctgtggtggaaaacgaattatggtcccataaaaactggagagaagccttctcagaaacttctctgtgatgattgcattcaactcacagatttgaaccctcctatggatagagcattgttgaaactctctttttgtggaatctgcaagtggatatgtggacctctccgaagatgtctttggaaacgggaatatcttcacataaaaactaaacagaagcattctcagaaacttcttggtgatgtttgcattcaaatcccagagttgaaccttcctttgatagttcaggtttgaaacactctttctgtaggatctgcaagtggctatttggaccactctgtggccttcgttcgaaacgggtatatcttcgcataaaatctagacagaagcattctcagaaaatactttgtgatgattgagtttaaatcacagagctgaccattcctttggatggagcaggtttgagacacactttttgtagaatctacaagtggatatttggacctctctgaggatttcgttggaaacgggataactgcacctaactaaacggaaggattctcagaaactgctttgtgatgattgcattcacctcacagagttgaacattcctattgatagagcagtttggaaacactcttcttgtggaatgtgcaagtggagatttggagcgctttgaggcctatggtagtaaagggaatagcttcatagaaaaactagacagaagcgttctcaggaactccttgatgttgtttgtattcaacttccagagttgaactttccttcggaaagagcagctatgaaacactctttttctagagtctgcaagtggacatgaggagggctttgtggtttgtggtggaaaaggaaatatcttcacctaaatactagatagaagcattctcagaagcttctctgtgatgactgcattcaactcacggagttgaacactccttttgggagcgcagttttgaaactctctttctgtggcatccgcaaggggacatgtagacctctttgaagatttcgttggaaacggaatcatcttcacataaaaactatacagaagcagtctcagaatcttctttgtgatgttagcattcaaatcccagagttgaactttcctttcaaagttcacgtttgaaacactctttttgcaggatctacaagtggatatttggaccacttctgtgtccttcgttcgaaacgggtatatcttcacacgacatctagacagaagctttctcagaaaattctttgggatgattgagtggaactcacagagctgaacattccttgcgatgtagcagtttagaaacacactttctgcagaatctgcaagtgcatatttggacctctctgaggaattcgttggaaacgggataatttcagctgactaaacagaagcattctcagaaccttcttcgtgatgtctgcattcaactcacagtgtggaacctttctttgatagttcaggtttgaaacactctttttgtagaaactgcaaggggataattgcacttctttgaggcctaccgtagtaaaggaaataacttcctatagaaagaagacagaagaattctcagagccctcttcgtgatgtttgcattcaactcacagtgctgaacctttctttgatagtgcagctttgaaacactctttttgtagaaactgcaagtggatgtttggtcctctctgaggatttcgttggaaacgggataaaccgcacagaactaaaacagaagcattctcagaaccttcttcgtgatgtttgcattcaactcacagtgttgaacctttctttgatagttcaggtttgaaacggtctttctgtagaaactgcaagtagatatttggacctctctgaggatttcgttggaaacgggataacccgcacagaactaaaacagaagcattcacagaaaactcttggtgacgactgagtttaactcacagagctgaacattcctttggatggagcagtttcgaaacacactatttgtagaatgtgcaagtggatatttgggcctctctgaggatttcgttggaaacgggataaaccgcacagaactaaacagaagcattctcagaaactactttgtgatgattgcattcaagtcacagagttgaacattccctttgacagagcagtttggaaactctctttgtgtagaatctgcaagtggagatatggaccgctttgaggcctatggtagtaaaggaaatagcttcatataaaagctagacagtagcattctcagaaacttctttgtgatgcttgcattcaactcacagagttgaactttcctttcgagagagaagctttgaaacactctttttccagaatctgcaagtggacatttggagggctttgaggcctgtggtggaaaaggaattatcttcccgtaaaagctagatagaagcattgtcagaaacttctttgtgatgattgcattcaactcacagagttgaaggttccttttcaaacagcagtttccaatcactctttctgtggaatctgcaagtggatatttgggcctctctgaggatttcgttggaaacgggataaaacgcacagaactaaaacagaagcattctcagaaacttctctgtgatgtttgtgttcaactcccagagtttcacattgcttctcatagagtagttctgaaacatgcttttcgtagtgtctgcaagtggacatttggagcgctttcaggcctgtggtggaaaacgaattatggtcacataaaaactggagagaagccttctcagaaacttctctgtgatgattgcattcaactcacagagttgaaccctcctatggatagagcagtgttgaaactctctttttgtggaatctgcaagcggatatgtggacctctccgaagatgtctttggaaacgagaatatcttcacataaaaactaaacagaagcattctcagaaacttcttggtgatgtttgcattcaaatcccagagttgaaccttcctttgagagttcaggtttgaaacactctttttgtaggatctgcaagtggatatttggaccactctgaggccttcgttcgaaacgggtacatcttcgcataaaatctagacagaagcattctcagaaaatactttgtgatgattgagttgaactcacagagctgaacattcctttggatggagcaggtttgagacacactttttgtagattctacaagtggatatttggacctctctgagaatttcgttggaaacgcgataactgcacctaattaaacggaagcactctcagaaactgctttgtgatgattgcattcacctcacagagttgaacattcctattgatagagcagtttggaaaaactcttgttgtggaatgtgcaagtggagatttggagcgctttgaggcctatggtagtaaagggaatagcttcatagaaaaactagacagatgcattctcaggaactttttggtgatgtttgtattcaactcccagagttgaactttcctttggaaagagcagctatgaaacactctttttctagaatctgcaagtggacgtttggagggctttgtggtttgtggtggaaaaggaaatatcttcacctaaatactagatagaagcattctcagaagcttctctgtgatgactgcattcaactcacggagttgaacactccttttgagagcgcagttttgaaactctctttctgtggcatctgcaaggggacatgtagacctctttgaagatttcgttggaaacggaatcatcttcacataaaaactatacagaagcagtctcagaatcttctttgtgatgtttgcattcaaatcccagagttgaactttcctttcaaagttcacgtttgaaacactctttttgcaggatctacaagtggatatttggaccactctgtgtccttcgttcgaaacgggtatatcttcacacgacatctagacagaagctttctcagaaaattctttgggatgattgagtggaactcacagagctgaacattccttgcgatgtagcagtttagaaacacactttctgcagaatctgcaagtgcatatttggacctctctgaggaattcgttggaaacgggataatttcagctgactaaacagaagcattctcagaaccttcttcgtgatgtctgcattcaactcacagtgtggaacctttctttgatagttcaggtttgaaacactctttttgtagaaactgcaaggggataattgcacttctttgaggcctaccgtagtaaaggaaataacttcctatagaaagaagacagaagcattctcagaaccctcttcgtgatgtttgcattcaactcacagtgctgaacctttctttgatagttcagctttgaaacactcttcttgtagaaactgcaagtggatatttggtcctctctgaggatttcgttggaaacgggataaaccgcacagaactaaacagaagcattctcagaaccttcttcgtgatgtttgcattcaactcacagtgttgaacctttctttgatagttcaggtttcaaacggtctttctgtagaaactgcaagtagatatttggacctctctgaggatttcgttggaaacgggataacccgcacagaactaaaacagaagcattcacagaaaactcttggtgacgactgagtttaactcacagagctgaacattcctttggatggagcagtttcgaaacacactatttgtagaatgtgcaagtggatatttgggactctctgaggatttcgttggaaacgggataaaccgcacagaactaaacagaagcattctcagaaactactttgtgatgattgcattcaagtcacagagttgaacattccctttgacagagcagtttggaaactctctttgtgtagaatctgcaagtggagatatggaccgctttgaggcctatggtagtaaaggaaatagcttcatataaaagctagacagtagcattctcagaaacttctttgtgatgcttgcattcaactcacagagttgaactttcctttcgagagagaagctttgaaacactctttttccagaatctgcaagtggacatttggagggctttgaggcctgtggtggaaaaggaattatcttcccgtaaaagcctagatagaagcattgtcagaaacttctttgtgatgattgcattcaactcacagagttgaaggttccttttcaaacagcagtttccaatcactctttctgtggaatctgcaagtggatatttgggcctctctgaggatttcgttggaaacgggataaaacgcacagaactaaaacagaagcattctcagaaacttctctgtgatgtttgtgttcaactcccagagtttcacgttgcttttcatagagtagttctgaaacatgcttttcgtagtgtctgcaagtggacatttggagcgctttcaggcctgtggtggaaaacgaattatggtcacataaaaactggagagaagccttctcagaaacttctctgtgatgattgcattcaactcacagagttgaaccctcctatggatagagcagtgttgaaactctctttttgtggaatctgcaagtggatatgtggacctctccgaagatgtctttggaaacgggaatatcttcacataaaaactaaacagaagcattctcagaaacttcttggtgatgtttgcattcaaatcccagagttgaaccttcctttgatagttcaggtttgaaacactctttttgtaggatctgcaagtggctatttggaccactctgtggccttcgttcgaaacgggtatatcttcgcataaaatctagacagaagcattctcagaaaacactttgtgatgattgagtttaaatcacagagctgaacattcctttggatggagcaggtttgagacacactttttgtagaatctacaagtggatatttggacctctctgaggatttcgttggaaacgggataactgcacctaactaaacggaagcattctcagaaactgctttgtgatgattgcattcacctcacagagttgaacattcctattgatagagcagtttggaaacactcttgttgtggaatgtgcaagtggagatttggagcgctttgaggcctatggtagtaaagggaatagcttcatagaaaaactagacagatgcattctcaggaaccttttggtgatgtttgtattcaactcccagagttgaactttcctttggaaagagcagctatgaaacactctttttctagaatctgcaagtggacgtttggagggctttgtggtttgtggtggaaaaggaaatatcttcacctaaatactagatagaagcatcctcagaagcttctctgtgatgactgcattcaactcacggagttgaacactccttttgagagcgcagttttgaaactctctttctgtggcatctgcaaggggacatgtagacctctttgaagatttcgttggaaacggaatcatcttcacataaaaactatacagaagcagtctcagaatcttctttgtgatgtttgcattcaaatcccagagttgaactttcctttcaaagttcacgtttgaaacactctttttgcaggatctacaagtggatatttggaccactctgtgtccttcgttcgaaacgggtatatcttcacaggacatctagacagaagctttctcagaaaattctttgggatgattgagtggaactcacagagctgaacattccttgcgatgtagcagtttagaaacacactttctgcagaatctgcaagtgcatatttggacctctctgaggaattcgttggaaacgggataatttcagctgactaaacagaagcattctcagaaccttcttcgtgatgtctgcattcaactcacagtgtggaacctttctttgatagttcaggtttgaaacactctttttgtagaaactgcaaggggataattgcacttctttgaggcctaccgtagtaaaggaaataacttcctatagaaagaagacagaagaattctcagagccctcttcgtgatgtttgcattcaactcacagtgctgaacctttctttgatagtgcagctttgaaacactctttttgtagaaactgcaagtggatgtttggtcctctctgaggatttcgttggaaacgggataaaccgcacagaactaaaacagaagcattctcagaaccttcttcgtgatgtttgcattcaactcacagtgttgaacctttctttgatagttcaggtttgaaacggtctttctgtagaaactgcaagtagatatttggacctctctgaggatttcgttggaaacgggataacccgcacagaactaaaacagaagcattcacagaaaactcttggtgacgactgagtttaactcacagagctgaacattcctttggatggagcagtttcgaaacacactatttctagaaggtgcaagtggatatgtgggcctctctgaggatttcgttggaaacgggataaaccgcacagaactaaacagaagcattctcagaaactactttgtgatgattgcattcaagtcacagagttgaacattccctttgacagagcagtttggaaactctctttgtgtagaatctgcaagtggagatatggaccgctttgaggcctatggtagtaaaggaaatagcttcatataaaagctagacagtagcattctcagaaacttctttgtgatgcttgcattcaactcacagagttgaactttcctttcgagagagaagctttgaaacactctttttccagaatctgcaagtggacatttggagggctttgaggcctgtggtggaaaaggaattaacttcccgtaaaagctagatagaagcattgtcagaaacttctttgtgatgattgcattcaactcacagagttgaaggttccttttcaaacagcagtttccaatcactctttctgtggaatctgcaagtggatatttgggcctctctgaggatttcgttggaaacgggataaaacgcacagaactaaaacagaagcattctcagaaacttctctgtgatgtttgtgttcaactcccagagtttcacgttgcttttcatagagtagttctgaaacatgcttttcgtagtgtctgcaagtggacatttggagcgctttcaggcctgtggtgcaaaacgaattatggtcccataaaaactggagagaagccttctcagaaacttctctgtgatgattgcattcaactcacagatttgaaccctcctatggatagagcattgttgaaactctctttttgtggaatctgcaagtggatatgtggacctctccgaagatgtctttggaaacgggaatatcttcacataaaaactaaacagaagcattctcagaaacttcttggtgatgtttgcattcaaatcccagagttgaaccttcctgtgatagttcaggtttgaaacactctttttgtaggatctgcaagtggatatttggaccactctgtggccttcgttcgaaacgggtacatcttcacataaaatctagacagaagcattctcagaaaatactttgtgatgattgagtttaactcacagagctgaacattcctttggatggagcaggtttgagacacactttttgcagaatctacaagtggatatttggacctctctgaggatttcgttggaaacgggataactgcacctaactaagcggaagcattctcagaaactgctttgtgatgattgcattcacctcacagagttgaacattcctattgatagagcagtttggaaacactcttgttgtggaatgtgcaagtggagatttggagcgctttgaggcctgtggtagtaaagggaatagcttcatagaaaaactagacagatgcattctcaggaactttttggtgatgtttgtattcaactcccagagttgaactttcctttggaaagagcagctatgaaacactctttttctagaatctgcaagtggacgtttggagggctttgtggtttgtggtggaaaaggaaatatcttcacctaaatactagatagaagcattctcagaagcttctctgtgatgactgcattcaactcacggagttgaacactccttttgagagcgcagttttgaaactctctttctgtggcatctgcaaggggacatgtagacctctttgaagatttcgttggaaacggaatcatcttcacataaaaactatacagaagcagtctcagaatcttctttgtgatgtttgcattcaaatcccagagttgaacttgcctttcaaagttcacgtttgaaacactctttttgcaggatctacaagtggatatttggaccactctgtgtccttcgttcgaaacgggtatatcttcacatgacatctagacagaagctttctcagaaaattctttgggatgattgagttgagcaaacagagctgaacactccttgcgatgtagcagtttagaaacaccctttctgcagaatctgcaagtgcatatgtggacctctctgaggaattcgttggaaacgggataatttcagctgactaaacagaagcattctcagaaccttcttcgtgatgtctgcattcaactcacagtgtggaacctttctttgatagttcaggtttgaaacactctttttgtagaaactgcaaggggatcattgcacttctttgaggcctaccgtagtaaaggaaataacttcctataaaaagaagacagaagaattctcagagccctcttcgtgatgtttgcattcaactcacagtgctgaacctttctttgatagtgcagctttgaaacactctttttgtagaaactgcaagtggatatttggtcctctctgaggatttcgctggaaacgggataaaccgcacagaactaaaacagaagcattctcagaaccttcttcgtgatgtttgtattcaacacacagtgttgaacctttctttgataattcaggtttgaaacggtctttctgtagaaactgcaagtagatatttggacctctctgaggatttcgttggaaacgggataaaccgcacagaactaaaacagaagcattcacagaaaactcttggtgacgactgagtttaactcacagagctgaacattcctttggatggagcagtttcgaaacacactatttgtagaatgtgcaagtggatatttaggcctctctgaggatttcgttggaaacgggataaaccgcacagaactaaacagaagcattctcagaaactactttgtgatgattgcattcaagtcacagagttgaacattccctttgacagagcagattggaaactctctttgtgtagaatctgcaagtggagatatggaccgctttgaggcctatggtagtaaaggaaatagcttcatataaaagctagacagtagcattctcagaaacttctttgtgatgcttgcattcaactcacagagttgaactttcctttcgagagagaagctttgaaacactctttttccagaatctgcaagtggacatttggagggctttgaggcctgtggtggaaaaggaattatcttcccgtaaaagctagatagaagcattgtcagaaacttctttgtgatgattgcattcaactcacagagttgaaggttccttttcaaacagcagtttccaatcactctttctgtggaatctgcaggtggatatttggaccgctttgaagatttcgttggaaacgggagaatcttcacagaaaagctaaacagaagcattctcagaaacttctctgtgatgtttgtgttcaactcccagagtttcacattgcttttcatagagtagttctgaaacatgcttttcgtagtgtctgcaagtggacatttggagagctttcaggcctgtggtggaaaacgaattatggtcacataaaaactggagagaagccttctcagaaacttctctgtgatgattgcattcaactcacagagttgaaccctcctatggatagagcagtgttgaaactctctttttgtggaatctgcaagtggatatgtggacctctccgaagatgtctttggaaatgggaaaatcttcacataaaagctaatcagaagcattctcagaaacttcttggtgatgtttgcattcaaatcccagagttgaaccttcctttgatagttcaggtttgaaacactctttttgtaggatctgcaagtggatatttggaccactctgtggccttcgttcgaaacgggtacatcttcgcataaaatctagacagaagcattctcagaaaatactttgtgatgattgagtttaactcacagagctgaacattcctttggatggagcaggcttgagacacactttttgtagaatctacaagtggatatttggacctctctgaggatttcgttggaaacgggataactgcacctaactaaacgtaagcattctcagaaactgctttgtgatgattgcattcacctcacagagttgaccattcctattgatagagcagtttggaaacactcttgttgtggaatgtgcaagtggagatttggagcgctttgaggcctatggtagtaaagggaatagcttcatagaaaaactagacagatgcattctcaggaactttttggtgatgtttgtattcaactcccagagttgaactttcctttggaaagagcagctatgaaacactctttttctagaatctgcaagtggacgtttggagggctttgtggtttgtggtggaaaaggaaatatcttcacctaaatactagatagaagcattctcagaagcttctctgtgatgactgcattcaactcacggagttcaacactccttttgagagcgcagttttgaaactctctttctgtggcatctgcaaggggacatgtagacctctttgaagattttgttggaaacggaatcatcttcacataaaaactatacagaagcagtctcagaatcttctttgtgatgtttgcattcaaatcccagagttgaactttcctttcaaagttcacgtttgaaacactctttttgcaggatctacaagtggatatttggaccactctgtgtccttcgttcgaaacgggtatatcttcacatgacatctagacagaagctttctcagaaaattctttgggatgattgagttgaagtcacagagctgaacattccttgtgatgtagcagtttagaaacacactttctgcagaatctgcaagtgcatatttggacctctctgaggaattcgttggaaacgggataatttcagctgactaaacagaagcattctcagagccttcttcgagatgtctgcattcaactcacagtgtggaacctttctttgatagttcaggtttgaaacactctttttgtagaaactgcaaggggataattgcacttctttgaggcctaccgtagcaaaagaaataacttcctataaaaagaagacagaagcattctcagaaccctcttcgtgatgtttgcattcaactcacagtgctgaatctttctttgatagttcagctatgaaacactctttttgtagaaactgcaagtggatatttggtcctctctgagcatttcgttggaaacgggataaactgcacagaactaaacagaagcattctcagaaccctcttcgtgatgtttgcattgaactcacggtgctgaacctttctttgatagttcagctttgaaacactctttttgtagaaactgcaagtggatatttggtcctctctgaggatttcgttggaaacgggataaaccgcacagaactaaacagaagcattcacagaaaactcttggtgacgactgagtttaactcacagagctgaacattcctttggatggagcagtttcgaaacacactatttgtagaatgtgcaagtggatatgtgggcctctctgaggatttcgttggaaacgggataaaccgcacagaactaaaacagaagcattctcagaaactactttgtgatgattgcattcaagtcacagagttgaacattccctttgacagagcagtttggaaactctttgtgtagaatctgcaagtggagatatggaccgctttgaggcctatggtagtaaaggaaatagcttcatataaaagctagacagtagcattctcagaaacttctttgtgatgcttgcattcaactcacagagttgaactttcctttcgagagagaagctttgaaacactctttttccagaatctgcaagtggacatttggagggctttgaggcctgtggtggaaaaggaattatcttcccgtaaaagcctagatagaagcattgtcagaaacttctttgtgatgattgcattcaactcacagagttgaaggttccttttcaaacagcagtttccaatcactctttctgtggaatctgcaagtggatatttgggcctctctgaggatttcgttggaaacgggataaaccgcacagaactaaaacagaagcattctcagaaacttctctgtgatgtttgtgttcaactcccagagtttcacattgcttctcatagagtagttccgaaacatgcttttcgtagtgtctgcaagtggacatttggagcgctttcaggcctgtggtggaaaacgaattatggtcacataaaaactggagagaagccttctcagaaacttctctgtgatgattgcattcaactcacagagttgaaccctcctatggatagagcagtgttgaaactctctttttgtggaatctgcaagtggatatgtggacctctccgaagatgtctttggaaacgggaatatcttcacataaaaactaaacagaagcattctcagaaacttcttggtgatgtttacattcaaatcccagagttgaagcttcctttgatagttcaggtttgaaacactctttttgtaggatctgcaagtggatatttggaccactctgtggccttcgttcgaaacgggtacatcttcgcataaaatctagacagaagcattctcagaaaatactttgtgatgattgagtttaaatcacagagctgaccattcctttggatggagcaggtttgagacacactttttgtagaatctacaagtggatatttggacctctctgaggatttcgttggaaacgggataactgcacctaactaaacggaagcattctcagaaactgctttgtgatgattgcattcacctcacagagttgaacattcctattgatagagcagtttggaaacactcttgttgtggaatgtgcaagtggagatttggagcgctttgaggcctatggtagtaaagggaatagcttcatagaaaaactagacagatgcattctcaggaactttttggtgatgtttgtattcaactcccagagttgaactttcctttggaaagagcagctatgaaacactctttttctagaatctgcaagtggacgtttggagggctttgtggtttgtggtggaaaaggaaatatcttcacctaaatactagatagaagcattctcagaagcttctctgtgatgactgcattcaactcacggagttgaacactccttttgagagcgcagttttgaaactctctttctgtggcatctgcaaggggacatgtagacctctttgaagatttcgttggaaacggaatcatcttcacataaaaactatacagaagcagtcccagaatcttctttgtgatgtttgcattcaaatcccagggttgaactttcctttccaagttcacgtttgaaacactctttttgcaggatctacaagtcgatatttggaccactctgcgtccttcgttcgaaacgggtatatcttcacatgacatctagactgaagctttctcagaaaattctttgggatgattgagttgagcaaacagagctgaacactccttgtgatgtagcagtttagaaacacactttctgcagaatctgcaagtgcatatgtggacctctctgaggaattcgttggaaataggataatttcagctgactaaacagaagcattctcagaaccttcttcgtgatgtctgcattcaactcacagtgtggaacctgtctttgatagttcaggtttgaaacactctttttgtagaaactgcaaggggatcattgcacttctttgaggcctaccgtagtaaaggagataacttcctataaaaagaagacagaagaattctcagagccctcttcgtgatgtttgcattcaactcacagtgctgaacctttctttgatagtgcagctttgaaacactctttttgtagaaactgcaagtggatgtttggtcctctctgaggatttcgttggaaacgggataaaccgcacagaactaaaacagaagcattctcagaaccttcttcgtgatgtttgcattcaactcacagtgttgaacctttctttgatagttcaggtttgaaacggtctttctgtagaaactgcaagtagatatttggacctctctgaggatttcgttggaaacgggataaaccgcacagaactaaaacagaagcattcacagaaaactcttggtgacgactgagtttaactcacagagctgaacattcctttggatggagcagtttcgaaacacactatttgtagaatgtgcaagtggatatttaggcctctctgaggatttcgttggaaacgggataaaccgcacagaactaaacagaagcattctcagaaactactttgtgatgattgcattcaagtcacagagttgaacattccctttgacagagcagtttggaaactctctttgtgtagaatctgcaagtggagatatggaccgctttgaggcctatggtagtaaaggaaatagcttcatataaaagctagacagtagcattctcagaaacttctttgtgatgcttgcattcaactcacagagttgaactttcctttcgagagagaagctttgaaacactctttttccagaatctgcaagtggacatttggagggctttgaggcctgtggtggaaaaggaattatcttcccgtaaaagctagatagaagcattgtcagaaacttctttgtgatgattgcattcaactcacagagttgaaggttccttttcaaacagcagtttccaatcactctttctgtggaatctgcaagtggatatttgggcctctctgaggatttcgttggaaacgggataaaacgcacagaactaaaacagaagcattctcagaaacttctctgtgatgtttgtgttcaactcccagagtttcacattgcttttcatagagtagttctgaaacatgcttttcgtagtgtctacaagtggacatttggagcgctttcaggcctgtggtggaaaacgaattatggtcacataaaaactggagagaagccttctcagaaacttctctgtgatgattgcattcaactcacagagttgaaccctcctatggatagagcagtgttgaaactctctttttgtggaatctgcaagtggatatgtggacctctccgaagatgtctttggaaacgggaatatcttcacataaaaactaaacagaagcattctcagaaacttcttggtgatctttgcattcaaatcccagagttgaaccttcctttgatagttcaggtttgaaacactctttttgtaggatctgcaagtggatatttggaccactctgtggccttcgttcgaaacgggtacatcttcacataaaatctagacagaagcattctcagaaaatactttgtgatgattgagtttaactcacagagctgaacattcctttggatggagcaggtttgagacacactttttgtagaaactacaagtggatatttggacctctctgaggatttcgttggaaacgcgataactgcacctaactaaacggaagcattctcagaaactgctttgtgatgattgcattcacctcacagagttgaacattcctattgatagagcagtttggaaacactcttgttgtggaatgtgcaagtggagatttggagcgctttgaggcctatggtagtaaagggaatagcttcatagaaaaactagacagatgcattctcaggaactttttggtgatgtttgtattcaactcccagagttcaactttcctttggaaagagcagctatgaaacactctttttctagaatctgcaagtggacgtttggagggctttgcggtttgtggtggaaaaggaaatatcttcacctaaatactagatagaagcatcctcagaagcttctctgtgatgactgcattcaactcacggagttgaacactccttttgagagcgcagttttgaaactctctttctgtggcatctgcaaggggacatgtagacctctttgaagatttcgttggaaacggaatcatcttcacataaaaactacacagaagcagtctcagaatcttctttgtgatgtttgcattcaaatcccagagttgaactttcctttcaaagttcacgtttgaaacactctttttgcaggatctacaagtggatatttggaccactctgtgtccttcgttcgaaacgggtatatcttcacacgacatctagacagaagctttctcagaaaattctttgggatgattgagtggaactcacagagctgaacattccttgcgatgtagcagtttagaaacacactttctgcagaatctgcaagtgcatatttggacctctctgaggaattcgttggaaacgggataatttcagctgactaaacagaagcattctcagaaccttcttcgtgatgtctgcattcaactcacagtgtggaacctttctttgatagttcagctttgaaacactctttttgtagaaactgcaaggggataattgcacttctttgaggcctaccgtagtaaaggaaataacttcctattaaaagaagacagaagaattctcagagccctcttcgtgatgtttgcattcaactcacagtgctgaacctttctttgatagtgcagctttgaaacactctttttgtagaaactgcaagtggatgtttggtcctctctgaggatttcgttggaaacgggataaaccgcacagaactaaaacagaagcattctcagaaccttcttcgtgatgtttgcattcaactcacagtgttgaacctttctttgatagttcaggtttgaaacggtctttctgtagaaactgcaagtagatatttggacctctctgaggatttcgttggaaaagggataacccgcacagaactaaaacagaagcattcacagaaaactcttggtgacgactgagtttaactcacagagctgaacattcctttggatggagcagtttcgaaacacactatttgtagaatgtgcaagtggatatttaggcctctctgaggatttcgttggaaacgggataaaccgcacagaactaaacagaagcattctcagaaactactttgtgatgattgcattcaagtcacagagttgaacattccctttgacagagcagtttggaaactctctttgtgtagaatctgcaagtggagatatggaccgctttgaggcctatggtagtaaaggaaatagcttcatataaaagctagacagtagcattctcagaaacttctttgtgatgcttgcattcaactcacagagttgaactttcctttcgagagagaagctttgaaacactctttttccagaatctgcaagtggacatttggagggctttgaggcctgtggtggaaaaggaattatcttcccgtaaaagctagatagaagcattgtcagaaacttctttgtgatgattgcattcaactcacagagatgaaggttcctttacaaacagcagtttccaaacactctttctgtggaatctgcaagtggatatttggacctctttgaagatttcgttggaaacgggagaatcttcacagaaaagctaaacagaagcattctcagaaacttctctgtgatgtttgtgttcaactcccagagtttcacattgcttttcatagagtagttctgaaacatgcttttcgtagtgtctgcaagtggacatttggagcgctttcaggcctgtggtggaaaacgaattatggtcccataaaaactggagagaagccttctcagaaacttctctgtgatgattgcattcaactcacagatttgaaccctcctatggatagagcattgttgaaactctctttttgtggaatctgcaagtggatatgtggacctctccgaagatgtctttggaaacgggaatatcttcacataaaaactaaacagaagcattctcagaaacttcttggtgatgtttgcattcaaatcccagagttgaaccttcctgtgatagttcaggtttgaaacactctttttgtaggatctgcaagtggatatttggaccactctgtggccttcgttcgaaacgggtacatcttcacataaaatctagacagaagcattctcagaaaatactttgtgatgattgagtttaactcacagagctgaacattcctttggatggagcaggtttgagacacactttttgtagaatctacaagtggatatttggacctctctgaggatttcgttggaaacgcgataactgcacctaactaaacggaagcattctcagaaactgctttgtgatgattgcattcacctcacagagttgaacattcctattgatagagcagtttggaaacactcttgttgtggaatgtgcaagtggagatttggagcgctttgaggcctatggtagtaaagggaatagcttcatagaaaaactagacagatgcattctcaggaaccttttggtgatgtttgtattcaactcccagagttgaactttcctttggaaagagcagctatgaaacactctttttctagaatctgcaagtggacgtttggagggctttgtggtttgtggtggaaaaggaaatatcttcacctaaatactagatagaagcactctcagaagcttctctgtgatgactgcattcaactcacggagttgaacactccttttgagagcgcagttttgaaactctctttctgtggcatctgcaaggggacatgtagacctctttgaagatttcgttggaaacggaatcatcttcacataaaaactatacagaagcagtctcagaatcttctttgtgatgtttgcattcaaatccccgagttgaactttcctttcaaagttcacgtttgaaacactctttttgcaggatctacaagtggatatttggaccactctgtgtccttcgttcgaaacgggtatatcttcacatgacatctagacagaagctttctcagaaaattctttgggatgattgagttgaactcacagagctgagcattccttgcgatgtagcagtttagaaacacactttctgcagaatctgcaagtgcatatttggacctctgtgaggaattcgttggaaacgggataatttcagctgactaaacagaagcattctcagaaccttcttcgtgatgtctgcattcaactcacagtgtggaacctttctttgatagttcaggtttgaaacactctttttgtagaaactgcaaggggataattgcacttctttgaggcctaccgtagtaaaggaaataacttcctatagaaagaagacagaagcattctcagaaccctcttcgtgatgtttgcattcaactcacagtgctgaacctttctttgatagttcagctttgaaacactctttttgtagaaactgcaagtggatatttggtcctctctgagcatttcgttggaaacgggataaactgcacagaactaaacagaagcattctcagaaccttcttcgtgatgtttgcattcaactcacagtgttgaacctttctttgatagctcaggtttgaaacggtctttctgtagaaactgcaagtagatatttggacctctctgaggatttcgttggaaacgggataacccgcacagaactaaaacagaagcattcacagaaaactcttggtgacgactgagtttaactcacagagctgaacattcctttggatggagcagtttcgaaacacactatttgtagaatgtgcaagtggatatttgggcctctctgaggatttcgttggaaacgggataaaccgcacagaactaaacagaagcattctcagaaactactttgtgatgattgcattcaagtcacagagttgaacattccctttgacagagcagtttggaaactctctttgtgtagaatctgcaagtggagatatggaccgctttgaggcctatggtagtaaaggaaatagcttcatataaaagctagacagtaacattctcagaaacttctttgtgatgcttgcattcaagtcacagagttgaactttcctttcgagagagaagctttgaaacactctttttccagaatctgcaagtggacatttggagggctttgaggcctgtggtggaaaaggaattaacttcccgtaaaagctagatagaagcattgtcagaaacttctttgtgatgattgcattcaactcacagagttgaaggttccttttcaaagagcagtttccaatcactctttctgtggaatctgcaagtggatatttggacctattttgaagatttcgttggaaacgggagaatcttcacaggaaagctaaacagaagcattctcagaaacttctctgtgatgtttgtgttcaactcccagagtttcacattgcttttcatagagtagttctgaaacatgcttttcgtagtgtctacaagtggacatttggagcgctttcaggcctgtggtggaaaacgaattatggtcacataaaaactggagagaagccttctcagaaacttctctgtgatgattgcattcaactcacagagttgaaccctcctatggatagagcagtgttgaaactctctttttgtggaatctgcaagtggatacgtggacctctccgaagatgtctttggaaacgggaatatcttcacataaaaactaaacagaagcattctcagaaacttcttggtgatgtttgcattcaaatcccagagttgaaccttcctttgatagttcaggtttgaaacactctttctgtaggatctgcaagtggctatttggaccactctgtggccttcgttcgaaacgggtatatcttcgcataaaatctagacagaagcattctcagaaaatactttgtgatgattgagtttaaatcacagagctgaccattcctttggatggagcaggtttgagacacactttttgtagaatctacaagtggatatttggacctctctgaggatttcgttggaaacgggataactgcacctaactaaacggaagcattctcagaaactgctttgtgatgattgcattcacctcacagagttgaacattcctattgatagagcagtttggaaacactcttgttgtggaatgtgcaagtggagatttggagcgctttgaggcctatggtagtaaagggaatagcttcatagaaaaactagacagatgcattctcaggaactttttggtgatgtttgtattcaactcccagagttgaactttcctttggaaagagcagctatgaaacactgtttttctagaatctgcaagtggacgtttggagggctttgtggtttgtggtggaaaaggaaatatcttcacctaaatactagatagaagcattctcagaagcttctctgtgatgactgcattcaactcacggagttgaacactccttttgagagcgcagttttgaaactctctttctgtggcatctgcaaggggacatgtagacctctttgaagatttcgttggaaacggaatcatcttcacataaaaactatacagaagcagtctcagaatcttctttgtgatgtttgcattcaaatcccagagttgaactttcctttccaagttcacgtttgaaacactctttttgcaggatctacaagtggatatttggaccactctgtgtccttcgttcgaaacgggtatatcttcacatgacatctagacagaagctttctcagaaaattctttgggatgattgagtggaactcacagagctgaacattccttgcgatggagcagtttagaaacacactttctgcagaatctgcaagtgcatatttggacctctctgaggaattcgttggaaacgggataatttcagctgactaaacagaagcattctcagaaccttcttcgtgatgtctgcattcaactcacagtgtggaacctttctttgatagttcaggtttgaaacactctttttgtagaaactgcaaggggataattgcactctttgaggagtaccgtagtaaaggaaataacttcctataaaaagaagacagaagcattctcagaaccctcttcgtgatgtttgcattcaactcacagtgctgaacctttctttgatagttcagctttgaaacactctttttgtagaaactgcaagtggatatttggtcctctctgagcatttcgttggaaacgggataaactgcacagaactaaacagaagcattctcagaaccttcttcgtgatgtttgcattcaactcacagtgttgaacctttctttgatagttcaggtttcaaacggtctttctgtagaaactgcaagtagatatttggacctctctgaggatttcgttggaaacgggataacccgcacagaactaaaacagaagcattcacagaaaactcttggtgacgactgagtttaactcacagagctgaacattcctttggatggagcagtttcgaaacacactatttgtagaatgtgcaagtggatatttaggcctctctgaggatttcgttggaaacgggataaaccgcacagaactaaacagaagcattctcagaaactactttgtgatgattgcattcaagtcacagagttgaacattccctttgacagagcagtttggaaactctctttgtgtagaatctgcaagtggagatatggaccgctttgaggcctatggtagtaaaggaaatagcttcatataaaagctagacagtagcattctcagaaacttctttgtgatgcttgtattcaactcacagagttgaactttcctttcgagagagaagctttgaaacactctttttccagaatgtgcaagtggatatttggagggctttgaggcctgtggtggataaggaattatcttcccgtaaaagctagatggaagcattgtcagaaacttctttgtgatgattgcattcaactcacagagttgaaggttccttttcaaacagcagtttccaatcactctttctgtggaatctgcaagtggatatttggacctattttgaagattgcgttggaaacgggataatcttcacagaaaaggtaaacagaagcattctcagaaacttctctgtgatgtttgtgttcaactcccagagtttcacattgcttttcatagagtagttctgaaacatgcttttcgtagtgtctgcaagtggacatttggagcgctttcaggcctgtggtggaaaacgaattatggtcacataaaaactggagagaagccttctcagaaacttctctgtgatgattgcattcaactcacagagttgaaccctcctatggatagagcagtgttgaaactctctttttgtggaatctgcaagtggatatgtggacctctccgaagatgtctttggaaacgggaatatcttcacataaaaactaaacagaagcattctcagaaacttcttggtgatgtttgcattcaaatcccagagttgaaccttcctttgatagttcaggtttgaaacactctttttgtaggatctgcaagtggatatttggaccactctgtggccttcgttcgaaacgggtatatcttcgcataaaatctagacagaagcattctcagaaaatactttgtgatgattgagtttaactcacagagctgaacattcctttggatggagcaggtttgagacacactttttgtagaatctacaagtggatatttggacctctctgaagatttcgttggaaacgggataactgcacctaactaaacggaagcattctcagaaactgctttgtgatgattgcattcacctcacagagttgaacattcctattgatagagcagtttggaaacactcttgttgtggaatgtgcaagtggagatttggagcgctttgaggcctatggtagtaaagggaatagcttcatagaaaaactagacagatgcattctcaggaactttttggtgatgtttgtattcaactcccagagttgaactttcctttggaaagagcagctatgaaacactctttttctagaatctgcaagtggacgtttggagggctttgtggtttgtggtggaaaaggaaatatcttcacctaaatactagatagaagcatcctcagaagcttctctgtgatgactgcattcaactcacggagttgaacactccttttgagagcgcagttttgaaactctctttctgtggcatctgcaaggggacatgtagacctctttgaagatttcgttggaaacggaatcatcttcacataaaaactacacagaagcagtctcagaatcttctttgtgatgtttgcattcaaatcccagagttgaactttcctttcaaagttcacgtttgaaacactctttttgcaggatctacaagtggatatttggaccactctgtgtccttcgttcgaaacgggtataacttcacacgacatctagacagaagctttctcagaaaattctttgggatgattgagtggaactcacagagctgaacattccttgcgatgtagcagtttagaaacacactttctgcagaatctgcaagtgcatatttggacctctctgaggaattcgttggaaacgggataatttcagctgactaaacagaagcattctcagaaccttcttcgtgatgtctgcattcaactcacagtgtggaacctttctttgatagttcaggtttgaaacactctttttgtagaaactgcaaggggataattgcacttctttgaggcctaccgtagtaaaggaaataacttcctatagaaagaagacagaagcattctcagaaccctcttcgtgatgtttgcattcaactcacggtgctgaacctttctttgatagttcagctttgaaacactctttttgtagaaactgcaagtggatatttggtcctctctgaggatttcgttggaaacgggataaaccgcacagaactaaacagaagcattctcagaaccttcttcgtgatgtttgcattcaactcacagtgttgaacctttctttgatagttcaggtttgaaacggtctttctgtagaaactgcaagtagatatttggacctctctgaggatttcgttggaaacgggataacccgcacagaactaaaacagaagcattcacagaaaactattggtgacgactgagtttaactcacagagctgaacattcctttggatggagcagtttcgaaacacactatttgtagaatgtgcaagtggatattggggcctctctgaggatttcgttggaaacgggataaaccgcacagaactaaacagaagcattctcagaaactactttgtgatgattgcattcaagtcacagagttgaacattccctttgacagagcagtttggaaactctctttgtgtagaatctgcaagtggagatatggaccgctttgaggcctatggtagtaaaggaaagagcttcatataaaagctagacagtagcattctcagaaacttctttgtgatgcttgcattcaactcacagagttgaactttcctttcgagagagaagctttgaaacactctttttccagaatctgcaagtggacatttggagggctttgaggcctgtggtggaaaaggaattaacttcccgtaaaagctagatagaagcatagtcagaagcttctttgtgatgattgcattcaactcacagagttgaaggttccttttcaaacagcagtttccaatcactctttctgtggaatctgcaagtgtatatttggacctattttgaagatttcgttggaaacgggataatcttcacagaaaagctaaacagaagcattctcagaaacttctctgtgatgtttgtgttcaactcccagagtttcacattgcttttcatagagtagttctgaaacatgcttttcgtagtgtctacaagtggacatttggagcgctttcaggcctgtggtggaaaacgaattatggtcacataaaaactggagagaagccttctcagaaacttctctgtgatgattgcattcaactcacagagttgaaccctcctatggatagagcagtgttgaaactctctttttgtggaatctgcaagtggatatgtggacctctccgaagatgtctttggaaacgggaatatcttcacataaaaactaaacagaagcattctcagaaacttcttggtgatgtttgcattcaaatcccagagttgaaccttcctttgatagttcaggtttgaaacactctttttgtaggatctggaagtggctatttggaccactctgtggccttcgttcgaaacgggtatatcttcgcataaaatctagacagaagcattctcagaaaatactttgtgatgattgagtttaaatcacagagctgaccattcctttggatggagcaggtttgagacacactttttgtagaatctacaagtggatatttggacctctctgaggatttcgttggaaacgggataactgcacctaactaaacggaagcattctcagaaactgctttgtgatgattgcattcacctcacagagttgaacattcctattgatagagcagtttggaaacactcttgttgtggaatgtgcaagtggagatttggagcgctttgaggcctgtggtagtaaagggaatagcttcatagaaaaactagacagatgcattctcaggaactttttggtgatgtttgtattcaactcccagagttgaactttcctttggaaagagcagctatgaaacactctttttctagaatctgcaagtggacgtttggagggctttgtggtttgtggtggaaaaggaaatatcttcacctaaatactggatagaagcattctcagaagcttctctgtgatgactgcattcaactcacagagttgaacactccttttgagagcgcagttttgaaactctctttctgtggcatctgcaaggggacatgtagacctctttgaggatttcgttggaaacggaatcatcttcacataaaaactatacagaagcagtctcagaatcttctttgtgatgtttgcattcaaatcccagagttgaactttcctttcaaagttcacgtttgaaacactctttttgcaggatctacaagtggatatttggaccactctgtgtccttcgttcgaaacgggtatatcttcacatgacatctagacagaagctttctcagaaaattctttgggatgattgagtggaactcacagagctgaacattccttgcgatgtagcagtttagaaacacactttctgcagaatctgcaagtgcatatttggacctctctgaggaattcgttggaaacgggataatttcagctgactaaacagaagcattctcagaaccttcttcgtgatgtctgcattcaactcacagtgtggaacctttctttgatagttcaggtttgaaacactctttttgtagaaactgcaaggggataactgcacttgtttgaggcctatcgtagtaaaggaaataacttcctataaaaagaagacagaagcattctcagaaccctcttcgtgatgtttgcattcaactcacagtgctgaacctttctttgatagttcagctttgaaacactcttcttgtagaaactgcaagtggatatttggtcctctctgaggatttcgttggaaacgggataaaccgcacagaactaaacagaagcattctcagaaccttcttcgtgatgtttgcattcaactcacagtgttgaaccttcctttgatagttcaggtttgaaacgatctttctgtagaaactgcaagtagatatttggacctctctgaggatttcgttggaaacgggataaaccgcacagaactaaaacagaagcattcacagaaaactcttggtgacgactgagtttaactcacagagctgaacattcctttggatggagcagtttcgaaacacactatttgtagaatgtgcaagtggatatttgggcctctctgaggatttcgttggaaatgggataaaccgcacaaaactaaacagaagcattctcagaaactactttgtgatgattgcattcaagtcacagagttgaacattccctttgacagagcagtttggaaactctctttgtgtagaatctgcaagtggagatatggaccgcgttgaggcctatggtagtaaaggaaatagctacatataaaagctagacagtagcattctcagaaacttctttgtgatgcttgcattcaactcacagagttgaactttcctttcgagagagaagctttgaaacactctttttccagaatctgcaagtggacatttggagggctttgaggcctgtggtggaaaaggaattatcttcccgtaaaagctagatagaagcattgtcagaaacttctttgtgatgattgcattcaactcacagagttgaaggttccttttcaaacagcagtttccaatcactctttctgtggaatctgcaagtggatatttgggcctctctgaggatttcgttggaaacgggataaaacgcacagaactaaaacagaagcattctcagaaacttctctgtgatgtttgtgttcaactcccagagtttcacgttgcttttcatagagtggttctgaaacatgcttttcgtagtgtctgcaagtggacatttggagcgctttcaggcctgtggtggaaaacgaattatggtcacataaaaactggagagaagccttctcagaaacttctctgtgatgattgcattcaactcacagagttgaaccctcctatggatagagcagtgttgaaactctctttttgtggaatctgcaagtggatatgtggacctctccgaagatgtctttggaaacgggaatatcttcacataaaaactaaacagaagcattctcagaaacttcttggtgatgtttgcattcaaatcccagagttgaaccttcctttgatagttcaggtttgaaacactctttctgtaggatctgcaagtggctatttggaccactctgtggccttcgttcgaaacgggtatatcttcgcataaaatctagacagaagcattctcagaaaatactttgtgatgattgagtttaaatcacagagctgaccattcctttggatggagcaggtttgagacacactttttgtagaatctacaagtggatatttggacctctctgaggatttcgttggaaacgggataactgcacctaactaaacggaagcattctcagaaactgctttgtgatgattgcattcacctcacagagttgaacattcctattgatagagcagtttggaaacactcttgttgtggaatgtgcaagtggagatttggagcgctttgaggcctatggtagtaaagggaatagcttcatagaaaaactagacagatgcattctcaggaactttttggtgatgtttgtattcaactcccagagttgaactttcctttggaaagagcagctatgaaacactctttttctagaatctgcaagtggacgtttggagggctttgtggtttgtggtggaaaaggaaatatcttcacctaaatactagatagaagcattctcagaagcttctctgtgatgactgcattcaactcacggagttgaacactccttttgagagcgcagttttgaaactctctttctgtggcatctgcaaggggacatgtagacctctttgaagatttcgttggaaacggaatcatcttcacataaaaactatacagaagcagtctcagaatcttctttgtgatgtttgcattcaaatcccagagttgaactttcctttcaaagttcacgtttgaaacactctttttgcaggatctacaagtggatatttggaccactctgtgtccttcgttcgaaacgggtatatcttcacacgacatctagacagaagctttctcagaaaattctttgggatgattgagttgaactcacagagctgaacattccttgcgatgtagcagtttagaaacacattttctgcagaatctgcaagtgcatatttggacctctctgaggaattcgttggaaacgggataatttcagctgactaaacagaagcattctcagaaccttcttcgtgatgtctgcattcaactcacagtgtggaacctttctttgatagttcaggtttgaaacactctttttgtagaaactgcaaggggataattgcacttctttgaggcctaccgtagtaaaggaaataacttcctatagaaagaagacagaagcattctcagaaccctcttcgtgatgtttgcattcaactcacagtgctgaacctttctttgatagttcagctttgaaacactcttcttgtagaaactgcaagtggatatttggtcctctctgaggatttcgttggaaacgggataaaccgcacagaactaaacagaagcattctcagaaccttcttcgtgatgtttgcattcaactcacagtgttgaacctttctttgatagttcaggtttgaaacggtctttctgtagaaactgcaagtagatatttggacctctctgaggatttcgttggaaacgggataacccgcacagaactaaaacagaagcattcacagaaaactcttggtgacgactgagtttaactcacagagctgaacattcctttggatggagcagtttcgaaacacactctttgtagaatgtgcaagtggatatttgggcctctctgaggatttcgttggaaacgggataaaccgcacagaactaaaacagaagcattctcagaaactactttgtgatgattgcattcaagtcacagagttgaacattccctttgacagagcagtttggaaactctctttgtgtagaatctgcaagtggagctatggaccgctttgaggcctatggtagtaaaggaaatagtttcatataaaagctagacagcagcattctcagaaacttctttgtgatgcttgcattcaactcacagagttgaactttcctttcgagagagaagctttgaaacactctttttccagaatgtgcatgtggacatttggggagctttgaggcctggggtggaaaaggaattatcttcccgtaaaagctagatagaagcattgtcagaaacttctttgtgatgattgcattcaactcacagagttgaaggttccttttcaaacagcagtttccaatcactctttctgtggaatctgcaagtggatatttgggcctctctgaggatttcgttggaaacgggataaaacgcacagaactaaaacagaagcattctcagaaacttctctgtgatgtttgtgttcaactcccagagtttcacgttgcttttcatagagtagttctgaaacatgcttttcgtagtgtctgcaagtggacatttggagcgctttcaggcctgtggtggaaaacgaattatggtcacataaaaactggagagaagccttctcagaaacttctctgtgatgattgcattcaactcacagagttgaaccctcctatggatagagcagtgttgaaactctctttttgtggaatctgcaagtggatatgtggacctctccgaagatgtctttggaaacgggaatatcttcacataaaaactaaacagaagcattctcagaaacttcttggtgatgtttgcattcaaatcccagagttgaaccttcctttgatagttcaggtttgaaacactctttctgtaggatctgcaagtggctatttggaccactctgtggccttcgttcgaaacgggtatatcttcgcataaaatctagacagaagcattctcagaaaatactttgtgatgattgagtttaaatcacagagctgaccattcctttggatggagcaggtttgagacacactttttgtagaatctacaagtggatatttggacctctctgaggatttcgttggaaacgggataactgcacctaactaaacggaagcattctcagaaactgctttgtgatgattgcattcacctcacagagttgaacattcctattgatagagcagtttggaaacactcttgttgtggaatgtgcaagtggagatttggagcgctttgaggcctatggtagtaaagggaatagcttcatagaaaaactagacagatgcattctcaggaactttttggtgatgtttgtattcaactcccagagttgaactttcctttggaaagagcagctatgaaacactctttttctagaatctgcaagtggacgtttggagggctttgtggtttgtggtggaaaaggaaatatcttcacctaaatactagatagaagcattctcagaagcttctctgtgatgactgcattcaactcacggagttgaacactccttttgagagcgcagttttgaaactctctttctgtggcatctgcaaggggacatgtagacctctttgaagatttcgttggaaacggaatcatcttcacataaaaactatacagaagcagtctcagaatcttctttgtgatgtttgcattcaaatcccagagttgaactttcctttcaaagttcacgtttgaaacactctttttgcaggatctacaagtggatatttggaccactctgtgtccttcgttcgaaacgggtatatcttcacacgacatctagacagaagctttctcagaaaattgtttgggatgattgatttgaactcacagagctgagcattccttgcgatgtagcagtttagaaacacactttctgcagaatctgcaagtgcatatttggacctctctgaggaattcgttggaaacgggataatttcagctgactaaacagaagcattctcagaaccttcttcgtgatgtctgcattcaactcacagtgtggaacctttctttgatagttcaggtttgaaacactctttttgtagaaactgcaaggggataattgcactctttgaggagtaccgtagtaaaggaaataacttcctataaaaagaagacagaagcattctcagaaccctcttcgtgatgtttgcattcaactcacagtgctgaacctttctttgatagttcagctttgaaacactctttttgtagaaactgcaagtggatatttggtcctctctgaggatttcgttggaaacgggataaactgcacagaactaaacagaagcattctcagaaccttcttcgtgatgtttgcattcaactcacagtgttgaacctttctttgatagttcaggtttgaaacggtctttctgtagaaactgcaagtagatatttggacctctctgaggatttcgttggaaacgggataacccgcacagaactaaaacagaagcattcacagaaaactcttggtgacgactgagtttaactcacagagctgaacattcctttggatggagcagtttcgaaacacactatttgtagaatgtgcaagtggatatttgggcctctctgaggatttcgttggaaacgggataaaccgcacagaactaaacagaagcattctccgaaactactttgtgatgattgcattcaagtcacagagttgaacattccctttgacagagcagtttggaaactctctttgtgtagaatctgcaagtggagatatggaccacattgaggcctatggtagtaaaggaaatagcttcatataaaagctagacagtagcattctcagaaacttctttgtgatgcttgcattcaactcacagagttgaactttcctttcgagagagaagctttgaaacactctttttccagaatctgcaagtggacatttggagggctttgaggcctgtggtggaaaaggaattaacatcccgtaaaagctagatagaagcactgtcagaaacttctttgtgatgattgcattcaactcacagagatgaaggttcctttacaaacagcagtttccaaacactctttctgtggaatctgcaagtggatatttggacctctttgaagatttcgttggaaacggaagaatcttcacagaaaagttaaacagaagcattctcagaaacttctctgtgatgtttgtgttcaactcccagagtttcacattgcttctcatagagtacttctgaaacatgcttttcgtagtgtctgcaagtggacatttggagcgctttcaggcctgtggtataaaacgaattatggtcccataaaaactggagagaagccttctcagaaacttctctgtgatgattgcattcaactcacagatttgaaccctcctatggatagagcattgttgaaactctctttttgtggaatctgcaagtggatatgtggacctctccgaagatgtctttggaaacgggaatatcttcacataaaaactaaacagaagcattctcagaaacttcttggtgatgtttgcattcaaatcccagagttgaaccttcctttgatagttcaggtttgaaacactctttttgtaggatctgcaagtggatatttggaccactctgtggccttcgttcgaaacgggtatatcttcgcataaaatctagacagaagcattctcagaaaatactttgtgatgattgagttgaactcacagagctgaacattcctttggatggagcaggtttgagacacactttttgtagaatctacaagtggatatttggacctctctgaggatttcgttggaaacgggataactgcacctaactaaacggaagcattctcagaaactgctttgtgatgattgcattcacctcacagagttgaacattcctattgatagagcagtttggaaacactcttgttgtggaatgtgcaagtggagatttggagcgctttgaggtctatggtagtaaagggaatagcttcatagaaaaactagacagatgcattctcaggaactttttggtgatgtttgtattcaactcccagagttgaactttcctttggaaagagcagctatgaaacactctttttctagaatctgcaagtggacgtttggagggctttgtggtttgtggtggaaaaggaaatatcttcacctaaatactagatagaagcattctcagaagcttctctgtgatgactgcattcaactcacggagttgaacactccttttgagagcgcagttttgaaactctctttctgtggcatctgcaaggggacatgtagacctctttgaagatttcgttggaaacggaatcatcttcacataaaaactatacagaagcagtctcagaatcttctttgtgatgtttgcattcaaatcccagagttgaactttcctttcaaagttcacgtttgaaacactctttttgcaggatctacaagtggatatttggaccactctgtgtccttcgttcgaaacggttatatcttcacatgacatctagacagaagctttctcagaaaattctttgggatgattgagttgaactcacagagctgagcattccttgcgatgtagcagtttagaaacacactttctgcagaatctgcaagtgcatatttggacctctctgaggaattcgttggaaacgggataatttcagctgactaaacagaagcattctcagaaccttcttcgtgatgtctgcattcaactcacagtgtggaacctttctttgatagttcaggtttgaaacactctttttgtagaaactgcaaggggataattgcacttctttgaggcctaccgtagtaaaggaaataacttcctatagaaagaagacagaagaattctcagagccctcttcgtgatgtttgcattcaactcacagtgctgaacctttctttgatagtgcagctttgaaacactctttttgtagaaactgcaagtggatgtttggtcctctctgaggatttcgttggaaacgggataaaccgcacagaactaaaacagaagcattctcagaaccttcttcgtgatgtttgcattcaactcacagtgttgaacctttctttgatagttcaggtttgaaacggtctttctgtagaaactgcaagtagatatttggacctctctgaggatttcgttggaaacgggataacccgcacagaactaaaacagaagcattcacagaaaactcttggtgacgactgagtttaactcacagagctgaacattcctttggatggagcagtttcgaaacacactatttgtagaatctgcaagtggatatgtgggcctctctgaggatttcgttggaaacgggataaaccgcacagaactaaaacagaagcattctcagaaactactttgtgatgattgcattcaagtcacagagttgaacattccctttgacagagcagtttggaaactctctttgtgtagaatctgcaagtggagatatggaccgctttgaggcctatggtagtaaaggaaatagcttcatataaaagctagacagtagcattctcagaaacttctttgtgatgcttgcattcaactcacagagttgaactttcctttcgagagagaagctttgaaacactctttttccagaatctgcaagtggacatttggagggctttgaggcctgtggtggaaaaggaattatcttcccgtaaaagctagatagaagcattgtcagaaacttctttgtgatgattgcattcaactcacagagttgaaggttccttttcaaagagcagtttccaatcactctttgtgtggaatctgcaagtggatatttggacctattttgaagatttcgttggaaacgggagaatcttcacaggaaagctaaacagaagcattctcagaaacttctctgtgatgtttgtgttcaactcccagagtttcacattgcttttcatagagtagttctgaaacatgcttttcgtagtgtctacaagtggacatttggagcgctttcaggcctgtggtggaaaacgaattatggtcacataaaaactggagagaagccttctaagaaacttctctgtgatgattgcattcaactcacagagttgaaccctcctatggatagagcagtgttgaaactctctttttgtggaatctgcaagcggatatgtggacctctccgaagatgtctttggaaacgggaatatcttcacataaaaactaaacagaagcattctcagaaacttcttggtgatgtttgcattcaaatcccagagttgaaccttcctttgatagttcaggtttgaaacactctttctgtaggatctgcaagtggctatttggaccactctgtggccttcgttcgaaacgggtatatcttcgcataaaatctagacagaagcattctcagaaaatactttgtgatgattgagtttaaatcacagagctgaccattcctttggatggagcaggtttgagacacactttttgtagaatctacaagtggatatttggacctctctgaggatttcgttggaaacgggataactgcacctaactaaacggaagcattctcagaaactgctttgtgatgattgcattcacctcacagagttgaacattcctattgatagagcagtttggaaacactcttgttgtggaatgtgcaagtggagatttggagcgctttgaggtctatggtagtaaagggaatagcttcatagaaaaactagacagatgcattctcaggaactttttggtgatgtttgtattcaactcccagagttgaactttcctttggaaagagcagctatgaaacactctttttctagaatctgcaagtggacgtttggagggctttgtggtttgtggtggaaaaggaaatatcttcacctaaatactagatagaagcatcctcagaagcttctctgtgatgactgcattcaactcacggagttgaacactccttttgagagcgcagttttgaaactctctttctgtggcatctgcaaggggacatgtagacctctttgaagatttcgttggaaacggaatcatcttcacataaaaactatacagaagcagtctcagaatcttctttgtgatgtttgcattcaaatccaagagttgaacttccctttcaaagttcacgtttgaaacactctttttgcaggatctacaagtggatatttggaccactctgtgtccttcgttcgaaacgggtatatcttcacatgacatctagacagaagctttctcagaaaatcctttgggatgattgagtggaactcacagagctgaacattccttgcgatgtagtagtttagaaacacactttctgcagaatctgcaagtgcatatttggacctctctgaggaattcgttggaaacgggataatttcagctgactaaacagaagcattctcagaaccttcttcgtgatgtctgcattcaactcacagtgtggaacctttctttgatagttcaggtttgaaactctctttttgtagaaactgcaaggggataattgcacttctttgaggcctaccgtagtaaaggaaataacttcctatagaaagaagacagaagcattctcagaaccttcttcgtgatgtttgcattcaactcacagtgctgaacctttctttgatagttcagctttgaaacactctttttgtagaaactgcaagtggatatttggacctctctgaggatttcgttggaaacgggataaaccgcacagaactaaaacagaagcattctcagaaccttcttcgtgatgtttgcattcaactcacagtgttgaacctttctttgatagttcaggtttgaaacggtctttctgtagaaactgcaagtagatatttggacctctctgaggatttcgttggaaacgggataaaccgcacagaactaaaacagaagcattcacagaaaactcttggtgacgactgagtttaactcacagagctgaacattcctttggatggagcagtttcgaaacacactatttgtagaatgtgcaagtggatatttgggcctctctgaggatttctttggaaacgggataaaccgcacagaactaaaacagaagcattctcagaaactactttgtgatgattgcattcaagtcacagagttgaacattccctttgacagagcagtttggaaactctctttgtgtagaatctgcaagtggagatatggaccgctttgaggcctatggtagtaaaggaaatagcttcatataaaagctagacagtagcattctcagaaacttctttgtgatgcttgcattcaactcacagagttgaactttcctttcgagagagaagctttgaaacactctttttccagaatgtgcaagtggacatttggggagctttgaggcctggggtggaaaaggaattatcttcccgtaaaagctagatagaagcattgtcagaaacttctttgtgatgattgcattcaactcacagagttgaaggttccttttcaaacagcagtttccaatcactctttctgtggaatctgcaagtggatatttgggcctctctgaggatttcgttggaaacgggataaaacgcacagaactaaaacagaagcattctcagaaacttctctgtgatgtttgtgttcaactcccagagtttcacgttgcttttcatagagtagttctgaaacatgcttttcgtagtgtctgcaagtggacatttggagcgctttcaggcctgtggtggaaaacgaattatggtcacataaaaactggagagaagccttctcagaaacttctctgtgatgattgcattcaactcacagagttgaaccctcctatggatagagcagtgttgaaactctctttttgtggaatctgcaagtggatatgtggacctctccgaagatgtctttggaaacgggaatatcttcacataaaaactaaacagaagcattctcagaaacttcttggtgatgtttgcattcaaatcccagagttgaaccttcctttgatagttcaggtttgaaacactctttttgtaggatctgcaagtggatatttggaccactctgtggccttcgttcgaaacgggtacatcttcgcataaaatctagacagaagcattctcagaaaatactttgtgatgattgagtttaactcacagatctgaacattcctttggatggagcaggtttgagacacactttttgtagaatctacaagtggatatttggacctctctgaggatttcgttggaaacctgataactgcacctaactaaacggaagcattctcagaaactgctttgtgatgattgcattcacctcacagagttgaccattcctattgatagagcagtttggaaacactcttcttgtggaatgtgcaagtggagatttggagcgctttgaggcctatggtagtaaagggaatagcttcatagaaaaactagacagatgcattctcaggaactttttggtgatgtttgtattcaactcccagagttgaactttcctttggaaagagcagctatgaaacactctttttctagaatctgcaagtggacgtttggagggctttgtggtttgtggtggaaaaggaaatatcttcacctaaatactagatagaagcattctcagaagcttctctgtgatgactgcattcaactcacggagttgaacactccttttgagagcgcagttttgaaactctctttctgtggcatctgcaagaggacatgtagacctctttgaagatttcgttggaaacggaatcatcttcacataaaaactatacagaagcagtctcagaatcttctttgtgatgtttgcattcaaatcccagagttgaactttcctttcaaagttcacgtttgaaacactctttttgcaggatctacaagtggatatttggaccactctgtgtccttcgttcgaaacgggtatatcttcacacgacatctagacagaagctttctcagaaaattctttgggatgattgagtggaactcacagagctgaacattcccttgcgatgtagcagtttagaaacacactttctgcagaatctgcaagtgcatatttggacctctctgaggaattcgttggaaacgggataatttcagctgactaaacagaagcattctcagaaccttcttcgtggtgtctgcattcaactcacagtgtggaacctttctttgatagttcaggtttgaaacactctttttgtagaaactgcaaggggataattgcacttctttgaggcctaccgtagtaaaggaaataacttcctatagaaagaagacagaagcattctcagaaccctcttcgtgatgtttgcattcaactcacagtgctgaacctttctttgatagttcagctttgaaacactcttcttgtagaaactgcaagtggatatttggtcctctctgaggatttcgttggaaacgggataaaccgcacagaactaaacagaagcattctcagaaccttcttcgtgatgtttgcattcaactcacagtgttgaacctttctttgatagttcaggtttgaaacggtctttctgtagaaactgcaagtagatatttggacctctctgaggatttcgttggaaacgggataacccgcacagaactaaaacagaagcattcacagaaaactcttggtgacgactgagtttaactcacagagctgaacattcctttggatggagcagtttcgaaacacactatttgtagaatgtgcaagtggatatttgggcctctctgaggatttcgttggaaacgggataaaccgcacagaactaaacagaagcattctcagaaactactttgtgatgattgcattcaagtcacagagttgaacattccctttgacagagcagtttggaaactctcattgtgtagaatctgcaagtggagatatggaccgctttgaggcctatggtagtaaaggaaatagcttcatataaaagctagacagtggcattctcagaaacttctttgtgatgcttgcattcaactcacagagttgaactttcctttcgagagagaagctttgaaacactctttttccagaatgtgcaagtggagatttggagggctttgaggcctgtggtggaaaaggaattatcttcccgtaaaagctagatggaagcattgtcagaaacttctttgtgatgattgcattcaactcacagagttgaaggttccttttcaaagagcagtttccaatcactctttctgtggaatctgcaagtggatatttggacctctttgaagatttcgttggaaacgggagaatcttcacagaaaagctaaacagaagcattctcagaaacttctctgtgatgtttgtgttcaactcccagagtttcacgttgcttttcatagagtagttctgaaacatgcttttcgtagtgtctgcaagtggacatttggagcgctttcaggcctgtggtggaaaacgaattatggtcacataaaaactggagagaagccttctcagaaacttctctgtgatgattgcattcaactcacagagttgaaccctcctatggatagagcagtgttgaaactctctttttgtggaatctgcaagtggatatgtggacctctccgaagatgtctttggaaacgggaatatcttcacataaaaactaaacagaagcattctcagaaacttcttggtgatgtttgcattcaaatcccagagttgaaccttcctttgatagttcaggtttgaaacactctttttgtaggatctgcaagtggatatttggaccactctgtggccttcgttcgaaacgggtacatcttcgcataaaatctagacagaagcattctcagaaaatactttgtgatgattgagtttaactcacagagctgaacattcctttggatggagcaggcttgagacacactttttgtagaatccacaagtggatatttggacctctctgaggatttcgttggaaacgggataactgcaccgaactaaacggaagcattctcagaaactgctttgtgatgattgcattcacctcacagagttgaacattcctattgatagagcagtttggaaacactcttgttgtggaatgtgcaagtggagatttggagcgctttgaggcctgtggtagtaaagggaatagcttcatagaaaaactagacagatgcattctcaggaactttttggtgatgtttgtattcaactcccagagttgaactttcctttggaaagagcagctatgaaacactctttttctagaatctgcaagtggacgtttggagggctttgtggtttgtggtggaaaaggaaatatcttcacctaaatactagatagaagcattctcagaagcttctctgtgatgactgcattcaactcacggagttgaacactccttttgagagcgcagttttgaaactctctttctgtggcatctgcaaggggacatgtagacctctttgaagatttcgttggtaacggaatcatcttcacatcaaaactatacagaagcagtctcagaatcttctttgtgatgtttgcattcaaatcccagagttgaactttcctttcaaagttcacgtttgaaacactctttttgcaggatctacaagtggatatttggaccactctgtgtccttcgttcgaaacgggtatatcttcacatgacatctagacagaagctttctcagaaaattgtttgggatgattgatttgaactcacagagctgagcattccttgcgatgtagcagtttagaaacacactttctgcagaatctgcaagtgcatatttggacctctctgaggaattcgttggaaacgggataatttcagctgactaaacagaagcattctcagaaccttcttcgtgatgtctgcattcaactcacagtgtggaacctttctttgatagttcaggtttgaaacactctttttgtagaaactgcaaggggataattgcactctttgaggagtaccgtagtaaaggaaataacttcctataaaaagaagacagaagcattctcagaaccctcttcgtgatgtttgcattcaactcacagtgctgaacctttctttgatagttcagctttgaaacactcttcttgtagaaactgcaagtggatatttggtcctctctgaggatttcgttggaaacgggataaaccgcacagaactaaacagaagcattctcagaaccttcttcgtgatgtttgcattcaactcacagtgttgaacctttctttgatagttcaggtttgaaacggtctttctgtagaaactgcaagtagatatttggacctctctgaggatttcgttggaaacgggataacccgcacagaactaaaacagaagcattcacagaaaactcttggtgatgactgagtttaactcacagagctgaacattcctttggatggagcagtttcgaaacacactatttgtagaatgtgcaagtggatatttgggcctctctgaggatttcgttggaaacgggataaaccgcacagaactaaacagaagcattctcagaaactactttgtgatgattgcattcaagtcacagagctgaacattccctttgacagagcagtttggaaactctctttgtgtagaatctgcaagtggagatatggaatgctttgaggactatggtagtaaaggaaatagcttcatataaaagctagacagtagcattctcagaaacttctttgtgatgcttgcattcaactcacagagttgaactttcctttcgagagagaagctttgaaacactctttttccagaatctgcaagtggacatttggaaggctttgaggcctgtggtggaaaaggaattatcttcccgtaaaagctagatagaagcattgtcagaaacttctttgtgatgattgcattcaactcacagagttgaaggttccttttcaaacagcagtttccaatcactctttctgtggaatctgcaagtggatatttgggcctctctgaggatttcgttggaaacgggataaaacgcacagaactaaaacagaagcattctcagaaacttctctgtgatgtttgtgttcaactcccagagtttcacgttgcttttcatagagtagttctgaaacatgcttttcgtagtgtctgcaagtggacatttggagcgctttcaggcctgtggtggaaaacgaattatggtcacataaaaactggagagaagccttctcagaaacttctctgtgatgattgcattcaactcacagagttgaaccctcctatggatagagcagtgttgaaactctctttttgtggaatctgcaagtggatatgtggacctctccgaagatgtctttggaaacgggaatatcttcacataaaaactaaacagaagcattctcagaaacttcttggtgatgtttgcattcaaatcccagagttgaaccttcctttgatagttcaggtttgaaacactctttttgtaggatctgcaagtggatatttggaccactctgtggccttcgttcgaaacgggtatatcttcgcataaaatctagacagaagcattctcagaaaatactttgtgatgattgagtttaaatcacagagctgaccattcctttggatggagcaggtttgagacacactttttgtagaatctacaagtggatatttggacctctctgaggatttcgttggaaacgggataactgcacctaactaaacggaagcattctcagaaactgctttgtgatgattgcattcacctcacagagttgaacattcctattgatagagcagtttggaaacactcttgttgtggaatgtgcaagtggagatttggagcgctttgaggcctatggtagtaaagggaatagcttcatagaaaaactagacagatgcattctcaggaactttttggtgatgtttgtattcaactcccagagttgaactttcctttggaaagagcagctatgaaacactctttttctagaatctgcaagtggacgtttggagggctttgtggtttgtggtggaaaaggaaatatcttcacctaaatactagagagaagcattctcagaagcttctctgtgatgactgcattcaactcacggagttgaacactccttttgagagcgcagttttgaaactctctttctgtggcatccgcaaggggacatgtagacctctttgaagatttcgttggaaacggaatcatcttcacataaaaactatacagaagcagtctcagaatcttctttgtgatgtttgcattcaaatcccagagttgaactttcctttcaaagttcacgtttgaaacactctttttgcaggatctacaagtggatatttggaccactctgtgtccttcgttcgaaacgggtatatcttcacatgacatctagacagaagctttctcagaaaattctttgggatgattgagtggaactcacagagctgaacattccttgcgatgtaccagtttagaaacacagtttctgcagaatctgcaagtgcatatttggacctctctgaggaattcgttggaaacgggataatttcagctgactaaacagaagcattctcagaaccttcttcgtgatgtctgcattcaactcacagtgtggaacctttctttgatagttcaggtttgaaacactctttttgtagaaactgcaaggggataattgcacttctttgaggcctaccgtagtaaaggaaataacttcctatagaaagaagacagaagcattctcagaaccctcttcgtgatgtttgcattcaactcacagtgctgaacctttctttgatagttcagctttgaaacactccttttgtagaaactgcaaatggatatttggtcctctctgaggatttcgttggaaaagggataaaacgcacagaactaaacagaagcattcacagaaaactcttggtgacgactgagtttaactcacagagctgaacattcctttggatggagcagtttcaaaacacactatttgtagaatctgcaagtggatatgtgggcctctctgaggatttcgttggaaacgggataaaccgcacagaactaaaacagaagcattctcagaaactactttgtgatgattgcattcaagtcacagagttgaacattccctttgacagagcagtttggaaactctctttgtgtagaatctgcaagtggagatatggaccgctttgaggcctatggtagtaaaggaaatagcttcatataaaagctagacagtagcattctcagaaacttctttgtgatgcttgcattcaactcacagagttgaactttcctttcgagagagaagctttgaaacactctttttccagaatctgcaagtggacatttggagggctttgaggcctgtggtggaaaaggaattaacttcccgtaaaagctagatagaagcattgtcagaaacttctttgtgatgattgcattcaactcacagagttgaaggttccttttcaaacagcagtttccaatcactctttctgtggaatctgcaagtggatatttcgacctctttgaagatttcgttggaaacgggagaatcttcacagaaaagctaaacagaagcattctcagaaacttctctgtgatgtttgtgttcaactcccagagtttcacgttgcttttcatagagtagttctgaaacatgcttttcgtagtgtctgcaagtggacatttggagcgctttcaggcctgtggtggaaaacgaattatggtcacataaaaactggagagaagccttctcagaaacttctctgtgatgattgcattcaactcacagagttgaaccctcctatggatagagcagtgttgaaactctctttttgtggaatctgcaagtggatatgtggacctctccgaagatgtctttggaaacgggaatatcttcacataaaaactaaacagaagcattctcagaaacttcttggtgatgtttgcattcaaatcccagagttgaaccttcctttgatagttcaggtttgaaacactctttctgtaggatctgcaagtggctatttggaccactctgtggccttcgttcgaaacgggtatatcttcgcataaaatctagacagaagcattctcagaaaatactttgtgatgattgagtttaaatcacagagctgaccattcctttggatggagcaggtttgagacacactttttgtagaatctacaagtggatatttggacctctctgaggatttcgttggaaacgggataactgcacctaactaaacggaagcgttctcagaaactgctttgtgatgattgcattcacctcacagagttgaacattcctattgatagagcagtttggaaacactcctgttgtggaatgtgcaagtggagatttggagcgctttgaggcctatggtagtaaagggaataacttcatagaaaaactagacagatgcattctcaggaactttttggtgatgtttgtattcaactcccagagttgaactttcctttggaaagagcagctatgaaacactctttttctagaatctgcaagtggacgtttggagggctttgtggtttgtggtggaaaaggaaatatcttcacctaaatactagatagaagcattctcagaagcttctctgtgatgactgcattcaactcacggaattgaacactccttttgagagcgcagttttgaaactctgtttctgtggcatctgcaaggggacatgtagacctctttgaagatttcgttggaaacggaatcatcttcacataaaaactatacagaagcagtctcagaatcttctttgtgatgtttgcattcaaatcccagagttgaactttcctttcaaagttcacgtttgaaacactctttttgcaggatctacaagtggatatttggaccactctgtgtccttcgttcgaaacgggtatatcttcacacgacatctagacagaagctttctcagaaaattgtttgggatgattgatttgaactcacagagctgagcattccttgcgatgtagcagtttagaaacacactttctgcagaatctgcaagtgcatatttggacctctctgaggaattcgttggaaacgggataatttcagctgactaaacagaagcattctcagaaccttcttcgtgatgtctgcattcaactcacagtgtggaacctttctttgatagttcaggtttgaaacactctttttgtagaaactgcaaggggatcattgcacttctttgaggcctaccgtagtaaaggagataacttactataaaaagaagacagaagcattctcagaaccttcttcgtgatgtttgcattcaactcacactgctgaacctttctttgatagttcagctttgaaacactctttttgtagaaactgcaagtcgatatttggtcctctctgaggatttcgttggaaacgggataaaccgcacagaactaaacagaagcattctcagaaccttcttcgtgatgtttgcattcaactcacagtgttgaacctttctttgatagttcaggtttgaaacggtctttctgcagaaactgcaagtagatatttggacctctctgaggatttcgttggaaacgggataaaccgcacagaactaaaacagaagcattcacagaaaactcttggtgacgactgagtttaactcacagagctgaacatccctttggatggagcagtttcgaaacacactatttgtagaatgtgcaagtggatattggggcctctctgaggatttcgttggaaacgggataaaccgcacagaactaaacagaagcattctcagaaactactttgtgatgattgcattcaagtcacagagttgaacattccctttgacagagcagtttggaaactctctttgtgtagaatctgcaagtggagatatggaccgctttgaggactatggtagtaaaggaaatagcttcatataaaagctagacagtagcattctcagaaacttctttgtgatgcttgcattcaactcacagagttgaactttcctttcgagagagaagctttgaaacactctttttccagaatctgcaagtggaaatttggagggctttgaggcctgtggtggaaaaggaattatcttcccgtaaaagctagatagaagcattgtcagaaacttctttgtgatgattgcattcaactcacagagttgaaggttccttttcaaacagcagtttccaatcactctttctgtggaatctgcaagtggatatttgggcctctctgaggatttcgttggaaacgggataaaacgcacagaactaaaacagaagcattctcagaaacttctctgtgatgtttgtgttcaactcccagagtttcacgttgcttttcatagagtagttctgaaacatgcttttcgtagtgtctgcaagtggacatttggagcgctttcaggcctgtggtggaaaacgaattatggtcacataaaaactggagagaagccttctcagaaacttctctgtgatgattgcattcaactcacagagttgaaccctcctatggatagagcagtgttgaaactctctttttgtggaatctgcaagtggatatgtggacctctccgaagatgtctttggaaacgggaatatcttcacataaaaactaaacagaagcattctcagaaacttcttggtgatgtttgcattcaaatcccagagttgaaccttcctttgagagttcaggtttgaaacactctttttgtaggatctgcaagtggatatttggaccactctgtgcccttcgttcgaaacgggtacatcttcgcataaaatctagacagaagcattctcagaaaatactttgtgatgattgcgttgaactcacagagctgaacattcctttggatggagcaggtttgagacacactttttgtagaatctacaagtggatatttggacctctctgaggatttcgttggaaacgggataactgcacctaactaaacggaagcattctcagaaactgctttgtgatgattgcattcacctcacagagttgaacattcctattgatagagcagtttggaaacactcttgttgtggaatgtgcaagtggagatttggagcgctttgaggcctatggtagtaaagggaatagcttcatagaaaaactagacagatgcattctcaggaactttttggtgatgtttgtattcaactcccagagttgaactttcctttggaaagagcagctatgaaacactctttttctagaatctgcaagtggacgtttggagggctttgtggtttgtggtggaaaaggaaatatcttcacctaaatactagatagaagcattctcagaagcttctctgtgatgactgcattcaactcacggagttgaacactccttttgagagcgtagttttgaaactctctttctgtggcatctgcaaggggacatgtagacctctttgaagatttcgttggaaacggaatcatcttcacataaaaactatacagaagcagtctcagaatcttctttgtgatgtttgcattcaaatcccagagttgaactttcctttcaaagttcacgtttgaaacactctttttgcaggatctacaagtggatatttggaccactctgtgtccttcgttcgaaacgggtataacttcacacgacatctagacagaagctttctcagaaaattctttgggatgattgagtggaactcacagagctgaacattccttgcgatgtagcagtttagaaacacactttctgcagaatctgcaagtgcatatttggacctctccgaggaattcgttggaaacgggataatttcagctgactaaacagaagcattctcagaaccttcttcgtgatgtctgcattcaactcacagtgtggaacctttctttgatagttcaggtttgaaacactctttttgtagaaactgcaaggggataattgcacttctttgaggcctaccgtagtaaaggaaataacttcctatagaaagaagacagaagaattctcagagccctcttcgtgatgtttgcattcaactcacagtgctgaacctttctttgatagtgcagctttgaaacactctttttgtagaaactgcaagtggatgtttggtcctctctgaggatttcgttggaaacgggataaaccgcacagaactaaaacagaagcattctcagaaccttcttcgtgatgtttgcattcaactcacagtgttgaacctttctttgatagttcaggtttgaaacggtctttctgtagaaactgcaagtagatatttggacctctctgaggatttcgttggaaacgggataacccgcacagaactaaaacagaagcattcacagaaaaactcttggtgacgactgagtttaactcacagagctgaacattcctttggatggagcagtttcgaaacacactatttgtagaatgtgcaagtggatatttaggcctctctgaggatttcgttggaaacgggataaaccgcacagaactaaacagaagcattctcagaaactactttgtgatgattgcattcaagtcacagagttgaacattccctttgacagagcagtttggaaactctctttgtgtagaatctgcaagtggagatatggaccgctttgaggcctatggtagtaaaggaaatagcttcatataaaagctagacagtagcattctcagaaacttctttgtgatgcttgcattcaactcacagagttgaactttcctttcgagagagaagctttgaaacactctttttccagaatctgcaagtggacatttggagggctttgaggcctgtggtggaaaaggaattatcttcccgtaaaagctagatagaagcattgtcagaaacttctttgtgatgattgcattcaactcacagagttgaaggttccttttcaaacagcagtttccaatcactctttctgtggaatctgcaagtggatatttgggcctctctgaggatttcgttggaaacgggataaaacgcacagaactaaaacagaagcattctcagaaacttctctgtgatgtttgtgttcaactcccagagtttcacgttgcttttcatagagtagttctgaaacatgcttttcgtagtgtctgcaagtggacatttggagcgctttcaggcctgtggtggaaaacgaattatggtcacataaaaactggagagaagccttctcagaaacttctctgtgatgattgcattcaactcacagagttgaaccctcctatggatagagcagtgttgaaactctctttttgtggaatctgcaagtggatatgtggacctctccgaagatgtctttggaaacgggaatatcttcacataaaaactaaacagaagcattctcagaaacttcttggtgatgtttgcattcaaatcccagagttgaaccttcctttgatagttcaggtttgaaacactctttctgtaggatctgcaagtggctatttggaccactctgtggccttcgttcgaaacgggtatatcttcgcataaaatctagacagaagcattctcagaaaatactttgtgatgattgagtttaactcacagagctgaacattcctttggatggagcaggtttgagacacactttttgtagaatctacaagtggatatttggacctctctgaggatttcgttggaaacgggataactgcacctaactaaacggaagcattctcagaaactgctttgtgatgattgcattcacctcacagagttgaacattcctattgatagagcagtttggaaacactcttgttgtggaatgtgcaagtggagatttggagcgctttgaggcctatggtagtaaagggaatagcttcatagaaaaactagacagatgcattctcaggaacattttggttatgtttgtattcaactcccagagttgaactttcctttggaaagagcagctatgaaacactctttttctagaatctgcaagtggacgtttggagggctttgtggtttgtggtggaaaaggaattatcttcacctaaatactagatagaagcattctcagaagcttctctgtgatgactgcattcaactcacggagttgaacactccttttgagagcgcagttttgaaactctctttctgtggcatctgcaaggggacatgtagacctctttgaagatttcgttggaaacggaatcatcttcacataaaaactatacagaagcagtctcagaatcttctttgtgatgtttgcattcaaatccccgagttgaactttcctttcaaagttcacgtttgaaacactctttttgcaggatctacaagtggatatttggaccactctgtgtccttcgttcgaaacgggtatatcttcacatgacatctagacagaagctttctcagaaaattctttgggatgattgagtggaactcacagagctgaacattccttgcgatgtagcagtttagaaacacactttctgcagaatctgcaagtgcatatttggacctctctgaggaattcgttggaaacgggataatttcagctgactaaacagaagcattctcagaaccttcttcgtgatgtctgcattcaactcacagtgtggaacctttccttgatagttcaggtttgaaacactctttttgtagaaactgcaaggggataattgcactctttgaggagtaccgtagtaaaggaaataacttcctctaaaaagaagacagaagcattctcagaaccctcttcgtgatgtttgcattcaactcacagtgctgaacctttctttgatagttcagctttgaaacactctttttgtagaaactgcaaatggatatttggtcctctctgaggatttcgttggaaaagggataaaacgcacagaactaaacagaagcattctcagaaccttcttcgtgatgtttgcattcaactcacagtgttgaacctttctttgatagttcaggtttgaaacggtctttctgtagaaactgcaagtagatatttggacctctctgaggatttcgttggaaacgggataaaccgcacagaactaaaacagaagcattcacagaaaactcttggtgacgactgagtttaactcacagagctgaacattcctttggatggagcagtttcgaaacacactatttgtagaatgtgcaagtggatatgtgggcctctctgaggatttcgttggaaacgggataaaccgcacagaactaaacagaagcattctcagaaactactttgtgatgattgcattcaagtcacagagttgaacattccctttgacagagcagtttggaaactctctttgtgtagaatctgcaagtggagatatggaccgctttgaggcctatggtagtaaaggaaatagcttcatataaaagctagacagtagcattctcagaaacttctttgtgatgcttgcattcaactcacagagttgaactttcctttcgagagagaagctttgaaacactctttttccagaatctgcaagtggacctttggagggctttgatgtctgtggtggaaaaggaattatcttcccgtaaaagctagatagaagcattgtcagaaacttctttgtgatgattgcattcaactcacagagttgaaggttccttttcaaacagcagtttccaatcactctttctgtggaatctgcaagtggatatttgggcctctctgaggatttcgttggaaacgggataaaacgcacagaactaaaacagaagcattctcagaaacttctctgtgatgtttgtgttcaactcccagagtttcacgttgcttttcatagagtagttctgaaacatgcttttcgtagtgtctgcaagtggacatttggagcgctttcaggcctgtggtggaaaacgaattatggtcacataaaaactggagagaagccttctcagaaacttctctgtgatgattgcattcaactcacagagttgaaccctcctatggatagagcagtgttgaaactctctttttgtggaatctgcaagtggatatgtggacctctccgaagatgtctttggaaacgggaatatcttcacataaaaactaaacagaagcattctcagaaacttcttggtgatgtttgcattcaaatcccagagttgaaccttcctttgatagttcaggtttgaaacactctttttgtaggatctgcaagtggatatttggaccactctgtggccttcgttcgaaacgggtatatcttcgcataaaatctagacagaagcattctcagaaaatactttgtgatgattgagtttaaatcacagagctgaccattcctttggatggagcaggtttgagacacactttttgtagaatctacaagtggatatttggacctctctgaggatttcgttggaaacgggataactgcacctaactaaacggaagcattctcagaaactgctttgtgatgattgcattcacctcacagagttgaacattcctattgatagagcagtttggaaacactcttgctgtggaatgtgcaagtggagatttggagcgctttgaggcctatggtagtaaaggaaatagcttcatagaaaaactagacagatgcattctcaggaactttttggtgatgtttgtattcaactcccagcagttgaactttcctttggaaagagcagctatgaaacactctttttctagaatctggaagtggacgtttggagggctttgtggtttgtggtggaaaaggaaatatcttcacctaaatactagatagaagcattctcagaagcttctctgtgatgactgcattcaactcacggagttgaacactccttttgagagcgcagttttgaaactctctttctgtggcatctgcaaggggacatgtagacctctttgaagatttcgttggaaacggaatcatcttcacataaaaactatacagaagcagtctcagaatcttctttgtgatgtttgcattcaaatcccagagttgaactttcctttcaaagttcacgtttgaaacactctttttgcaggatctacaagtggatatttggaccactctgtgtccttcgttcgaaacgggtacatcttcacatgacatctagacagaagctttctcagaaaattctttgggttgattgagtggaactcacagagctgaacattccttgcgatgtagcagtttagaaacacactttctgcagaatctgcaagtgcatatttggacctctctgaggaattcgttggaaacgggataatttcagctgactaaacagaagcattctcagaaccttcttcgtgatgtctgcattcaactcacagtgtggaacctttctttgatagttcaggtttgaaacactctttttgtagaaactgcaaggggataattgcacttctttgaggcctaccgtagtaaaggaaataacttcctatagaaagaagacagaagcattctcagaaccctcttcgtgatgtttgcattcaactcacagtgctgaacctttctttgatagttcagctttgaaacactcttcttgtagaaactgcaagtggatatttggtcctctctgaggatttcgttggaaacgggataaaccgcacagaactaaacagaagcattctcagaaccttcttcgtgatgtttgcattcaactcacagtgttgaacctttctttgatagttcaggtttcaaacggtctttctgtagaaactgcaagtagatatttggacctctctgaggatttcgttggaaacgggataactgcacctaactaaacggaagcattcacagaaaactcttggtgacgactgagtttaactcacagagctgaacattcctttggatggagcagtttcgagacacactatttgtagaatgtgcaagtggatatttgggcctctctgaggatttcgttggaaacgggataaaccgcacagaactaaacagaagcattctcagaaactgctttgtggtgattgcattcaagtcacagagttgaacattccctttgacagagcagtttggaaactctctttgtgtagaatctgcaagtggagatatggaccgctttgaggcctatggtagtaaaggaaatagcttcatataaaagctagacagtagcattctcagaaacttctttgtgatgcttgcattcaactcacagagttgaactttcctttcgagagagaagctttgaaacactctttttccagaatctgcaagtggacatttggagggctttgaggcctgtggtggaaaaggaattatcttcccgtaaaagctagatagaagcattgtcagaaacttctttgtgatgattgcattcaactcacagagatgaaggttcctttacaaacagcagtttccaaacactctttctgtggaatctgcaagtggatatttggacctctttgaagatttcgttggaaacgggagaatcttcacagaaaagctaaacagaagcattctcagaaacttctctgtgatgtttgtgttcaactcccagagtttcacattgcttttcatagagtagttctgaaacatgcttttcgtagtgtctgcaagtggacatttggagcgctttcaggcctgtggtggaaaacgaattatggtcacataaaaactggagagaagccttctcagaaacttctctgtgatgattgcattcaactcacagagttgaaccctcctatggatagagcagtgttgaaactctctttttgtggaatctgcaagtggatatgtggacctctccgaagatgtctttggaaacgggaatatcttcacataaaaactaaacagaagcattctcagaaacttcttggtgatgtttgcattcaaatcccagagttgaaccttcctttgatagttcaggtttgaaacactctttctgtaggatctgcaagtggctatttggaccactctgtggccttcgttcgaaacgggtatatcttcgcataaaatctagacagaagcattctcagaaaatactttgtgatgattgagtttaaatcacagagctgaccattcctttggatggagcaggtttgagacacactttttgtagaatctacaagtggatatttggacctctctgaggatttcgttggaaacgggataactgcacctaactaaacggaagcattctcagaaactgctttgtgatgattgcattcacctcacagagttgaacattcctattgatagagcagtttggaaacactcttgttgtggaatgtgcaagtggagatttggagcgctttgaggcctatggtagtaaagggaatagcttcatagaaaaactagacagatgcattctcaggaaccttttggtgatgtttgtattcaactcccagagttgaactttcctttggaaagagcagctatgaaacactctttttctagaatctgcaagtggacgtttggagggctttgtggtttgtggtggaaaaggaaatatcttcacctaaatactagatagaagcattctcagaagcttctctgtgatgactgcattcaactcacggagttgaacactccttttgagagcgcagttttgaaactctctttctgtggcatctgcaaggggacatgtagacctctttgaagatttcgttggaaacggaattcatcttcacataaaaactatacagaagcagtctcagaatcttctttgtgatgtttgcattcaaatcccagagttgaactttcctttcaaagttcacgtttgaaacactctttttgcaggatctacaagtggatatttggaccactctgtgtccttcgttcgaaacgggtatatcttcacatgacatctagacagaagctttctcagaaaattctttgggatgattgagtggaactcacagagctgaacattccttgcgatgtagcagtttagaaacacactttctgcagaatctgcaagtgcatatttggacctctctgaggaattcgttggaaacgggataatttcagctgactaaacagaagcattctcagaaccttcttcgtgatgtctgcattcaactcacagtgtggaacctttctttgatagttcaggtttgaaacactctttttgtagaaactgcaaggggataattgcacttctttgaggcctaccgtagtaaaggaaataacttcctataaaaagaagacagaagaattctcagagccctcttcgtgatgtttgcattcaactcacagtgctgaacctttctttgatagtgcagctttgaaacactctttttgtagaaactgcaagtggatgtttggtcctctctgaggatttcgttggaaacgggataaaccgcacagaactaaaacagaagcattctctgaaccttcttcgtgatgtttgcattcaactcacagtgttgaacctttctttgatagttcaggttggaaacggtctttctgtagaaactgcaagtagatatttggacctctctgaggatttcgttggaaacgggataaaccgcacagaactaaaacagaagcattcacagaaaactcttggtgacgactgagtttaactcacagagctgaacattcctttggatggagcagtttcgaaacacactatttgtagaatgtgcaagtggatatttaggcctctctgaggatttcgttggaaacgggataaaccgcacagaactaaacagaagcattctcagaaactactttgtgatgattgcattcaagtcacagagttgaacattccctttgacagagcagtttggaaactctctttgtgtagaatctgcaagtggagatatggaccgctttgaggcctatggtagtaaaggaaatagcttcatataaaacctagacagtagcattctcagaaacttctttgtgatgcttgcattcaactcacagagttgaactttcctttcgagagagaagctttgaaacactctttttccagaatgtgcaagtggacatttggggagctttgaggcctgtggtggaaaaggaattatcttcccgtaaaagctagatagaagcattgtcagaaacttctttgtgatgattgcattcaactcacagagttgaaggttccttttcaaacagcagtttccaatcactctttctgtggaatctgcaagtggatatttgggcctctctgaggatttcgttggaaacgggataaaacgcacagaactaaaacagaagcattctcagaaacttctctgtgatgtttgtgttcaactcccagagtttcacgttgcttttcatagagtagttctgaaacatgcttttcgtagtgtctgcaagtggacatttggagcgctttcaggcctgtggtggaaaacgaattatggtcacataaaaactggagagaagccttctcagaaacttctctgtgatgattgcattcaactcacagatttgaaccctcctatggatagagcattgttgaaactctctttttgtggaatctgcaagtggatatgtggacctctccgaagatgtctttggaaacgggaatatcttcacataaaaactaaacagaagcattctcagaaacttcttggtgatgtttgcattcaaatcccagagttgaaccttcctttgatagttcaggtttgaaacactctttttgtaggatctgcaagtggctatttggaccactctgtggccttcgttcgaaacgggtatatcttcgcataaaatctagacagaagcattctcagaaaatactttgtgatgattgagtttaaatcacagagctgaccattcctttggatggagcaggtttgagacacactttttgtagaatctacaagtggatatttggacctctctgaggatttcgttggaaacgggataactgcacctaactaaacggaagcattctcagaaactgctttgtgatgattgcattcacctcacagagttgaacattcctattgatagagcagtttggaaacactcttgttgtggaatgtgcaagtggagatttggagcgctttgaggcctatggtagtaaagggaatagcttcatagaaaaactagacagatgcattctcaggaactttttggtgatgtttgtattcaactcccagagttgaactttcctttggaaagagcagctatgaaacactctttttctagaatctgcaagtggacgtttggagggctttgtggtttgtggtggaaaaggaaatatcttcacctaaatactagatagaagcatcctcagaagcttctctgtgatgactgcattcaactcacggagttgaacactccttttgagagcgcagttttgaaactctctttctgtggcatctgcaaggggacatgtagacctctttgaagatttcgttggaaacggaatcatcttcacataaaaactacacagaagcagtctcagaatcttctttgtgatgtttgcattcaaatcccagagttgaactttcctttcaaagttcacgtttgaaacactctttttgcaggatctacaagtggatatttggaccactctgtgtccttcgttcgaaacgggtatatcttcacacgacatctagacagaagctttctcagaaaactctttgggatgattgagttgaactcacagagctgaacattccttgcgatgtagcagtttagaaacacactttctgcagaatctgcaagtgcatatttggacctctctgaggaattcgttggaaacgggataatttcagctgactaaacagaagcattctcagaaccttcttcgtgatgtctgcattcaactcacagtgtggaacctttctttgatagttcaggtttgaaacactctttttgtagaaactgcaaggggataattgcactctttgaggagtaccgtagtaaaggaaataacttcctataaaaagaagacagaagaattctcagagccctcttcgtgatgtttgcattcaactcacagtgctgaacctttctttgatagtgcagctttgaaacactctttttgtagaaactgcaagtggatgtttggtcctctctgaggatttcgttggaaacgggataaaccgcacagaactaaaacagaagcattctcagaaccttcttcgtgatgtttgcattcaactcacagtgttgaacctttctttgatagttcaggtttgaaacggtctttctgtagaaactgcaagtagatatttggacctctctgaggatttcgttggaaacgggataacccgcacagaactaaaacagaagcattcacagaaaactcttggtgacgactgagtttaactcacagagctgaacattcctttggatggagcagtttcgaaacacactatttctagaaggtgcaagtggatatgtgggcctctctgaggatttcgttggaaacgggataaaccgcacagaactaaacagaagcattctgagaaactactttgtgatgattgcattcaagtcacagagctgaacattccctttgacagagcagtttggaaactctctttgtgtagaatctgcaagtggagatatggaatgctttgaggactatggtagtaaaggaaatagcttcatataaaagctatacagtagcattctcagaaacttctttgtgatgcttgcattcaactcacagagttgaactttcctttcgagagagaagctttgaaacactctttttccagaatctgcaagtggacatttggagggctttgaggcctgtggtggaaaaggaattatcttcccgtaaaagctagatagaagcattgtcagaaacttctttgtgatgattgcattcaagtcacagagttgaaggttccttttcaaagagcagtttccaatcactctttctgtggaatctgcaagtggatatttggacctctttgaagatttcgttggaaacgggagaatcttcacagaaaagctaaacagaagcattctcagaaacttctctgtgatgtttgtgttcaactcccagagtttcacattgcttctcatagagtagttctgaaacatgcttttcgtagtgtctgcaagtggacatttggagcgctttcaggcctgtggtggaaaacgaattatggtcacataaaaactggagagaagccttctcagaaacttctctgtgatgattgcattgaactcacagagttgaaccctcctatggatagagcagtgttgaaactctctttttgtggaatctgcaagtggatatgtggacctctccgaagatgtctttggaaacgggaatatcttcacataaaaactaaacagaagcattctcagaaacttcttggtgatgtttgcattcaaatcccagagttgaaccttcctttgatagttcaggtttgaaacactctttttgtaggatctgcaagtggctatttggaccactctgtggccttcgttcgaaacgggtatatcttcgcataaaatctagacagaagcattctcagaaaatactttgtgatgattgagtttaactcacagagctgaacattcctttggatggagcaggtttgagacacactttttgtagaatctacaagtggatatttggacctctctgaggatttcgttggaaacgcgataactgcacctaactaaacggaagcattctcagaaactgctttgtgatgattgcattcacctcacagagttgaacattcctattgatagagcagtttggaaacactcttgttgtggaatgtgcaagtggagatttggagcgctttgaggcctatggtagtaaagggaatagcttcatagaaaaactagacagatgcattctcaggaactttttggtgatgtttgtattcaactcccagagttgaactttcctttggaaagagcagctatgaaacactctttttctagaatctgcaagtggacgtttggagggctttgtggtttgtggtggaaaaggaaatatcttcacctaaatactagatagaagcattctcagaagcttctctgtgatgactgcattcaactcacggagttgaacactccttttgagagcgcagttttgaaactctctttctgtggcatctgcaaggggacatgtagacctctttgaagatttcgttggaaacggaatcatcttcacataaaaactatacagaaacagtctcagaatcttctttgtgatgtttgcattcaaatcccagagttgaactttcctttcaaagttcacgtttgaaacactctttttgcaggatctacaagtggatatttggaccactctgtgtccttcgttcgaaacgggtatatcttcacacgacatctagacagaagctttctcagaaaattcttagggatgattgagtggaactcacagagctgaacattccttgcgatgtagcagtttagaaacacactttctgcagaatctgcaagtgcatatttggacctctctgaggaattcgttggaaacgggataatttcagctgactaaacagaagcattctcagaaccttcttcgtgctgtctgcattcaactcacagtgtggaacctttctttgatagttcaggtttgaaacactctttttgtagaaactgcaaggggataattgcacttctttgaggcctaccgtagtaaaggaaataacttcctatagaaagaagacagaagcattctcagagccctcttcgtgatgtttgcattcaactcacagtgctgaacctttctttgatagtgcagctttgaaacactctttttgtagaaactgcaagtggatgtttggtcctctctgaggatttcgttggaaacgggataaaccgcacagaactaaaacagaagcattctcagaaccttcttcgtgatgtttgcattcaactcacagtgttgaacctttctttgatagttcaggtttgaaacggtctttctgtagaaactgcaagtagatatttggacctctctgaggatttcgttggaaacgggataacccacacagaactaaaacagaagcattcacagaaaactcttggtgacgactgagtttaactcacagagctgaacattcctttggatggagcagtttcgaaacacactatttgtagaatgtgcaagtggatatttgggcctctctgaggatttcgttggaaacgggataaaccgcacagaactaaacagaagcattctcagaaactactttgtgatgattgcattcaagtcacagagttgaacattccctttgacagagcagtttggaaactctctttgtgtagaatctgcaagtggagatatggaccgctttgaggcctatggtagtaaaggaaatagcttcatataaaagctagacagtagcattctcagaaacgtctttgtgatgcttgcattcaactcacagagttgaactttcctttcgagagagaagatttgaaacactctttttccagaatgtgcaagtggacatttggggagctttgaggcctgtggtggaaaaggaattatcttcccgtaaaagctagatagaagcattgtcagaaacttctttgtgatgattgcattcaactcacagagttgaaggttccttttcaaacagcagtttccaatcactctttctgtggaatctgcaagtggatatttgggcctctctgaggatttcgttggaaacgggataaaacgcacagaactaaaacagagcattctcagaaacttctctgtgatgtttgtgttcaactcccagagtttcacgttgcttttcatagagtagttctgaaacatgcttttcgtagtgtctgcaagtggacatttggagcgctttcaggcctgtggtggaaaacgaattatggtcacataaaaactggagagaagccttctcagaaacttatctgtgatgattgcattcaactcacagagttgaaccctcctatggatagagcagtgttgaaactctctttttgtggaatctgcaagtggatatgtggacctctccgaagatgtctttggaaacgggaatatcttcacataaaaactaaacagaagcattctcagaaacttcttggtgatgtttgcattcaaatcccagagttgaaccttcctttgatagttcaggtttgaaacactctttctgtaggatctgcaagtggctatttggaccactctgtggccttcgttcgaaacgggtatatcttcgcataaaatctagacagaagcattctcagaaaatactttgtgatgattgagtttaaatcacagagctgaacattcctttggatggagcaggtttgagacacactttttgtagaatctacaagtggatatttggacctctctgaggatttcgttggaaacgggataactgcacctaactaaacggaagcattctcagaaactgctttgtgatgattgcattcacctcacagagttgaacattcctattgatagagcagtttggaaacactcttgttgtggaatgtgcaagtggagatttggagcgctttgaggcctatggtagtaaagggaatagcttcatagaaaaactagacagatgcattctcagaaactttttggtgatgtttgtattcaactcccagagttgaactttcctttggaaagagcagctatgaaacactctttttctagaatctgcaagtggacgtttggagggctttgtggtttgtggtggaaaaggaaatatcttcacctaaatactagatagaagcattctcagaagcttctctgtgatgactgcattcaactcacggagttgaacactccttttgagagcgcagttttgaaactctctttctgtggcatctgcaaggggacatgtagacctctttgaagagttcattggaaacggaatcatcttcacataaaatctatacagaagcagtctcagaatcttctttgtgatgtttgcattcaaatcccagagttgaacttgcctttcaaagttcacgtttgaaacactctttttgcaggatctacaagtggatatttggaccactctgtgtccttcgttcgaaacgggtatatcttcacatgacatctagacagaagctttctcagaaaattctttgggatgattgagttgaactcacagagctgaacattccttgcgatggagcagtttagaaacacactttctgcagaatctgcaagtgcatatttggacctctctgaggaattcgttggaaacgggataatttcagctgactaaacagaagcattctcagaaccttcttcgtgatgtctgcattcaactcacagtgtggaacctttctttgatagttcaggtttgaaacactctttttgtggaaactgcaaggggataattgcacttctttgaggcctaccgtagtaatggaaataacttcctataaaaagaagacagaagaactctcagagccctcttcgtgatgtttgcattcaactcacagtgctgaacctttctttgatagtgcagctttgaaacactctttttgtagaaactgcaagtggatatttggtcctctctgaggatttcgttggaaacgggataaaccgcacagaactaaaacagaagcattcacagaaaactcttggtgacgactgagtttaactcacagagctgaacattcctttggatggagcagtttcgaaacacactatttgtagaatctgcaagtggatatttgggcctctctgaggatttcgttggaaacgggataaaacgcacagaactaaaacagaagcattctcagaaactactttgttatgattgcaatcaagtcacagagttgaacattccctttgacagagcagtttggaaactctctttgtgtagaatctgcaagtggagatatggaccgctttgaggcctatggtagtaaaggaaatagcttcatataaaagctagacattagcattctcagaaacttctttgtgatgcttgcattcaactcacagagttgaactttcctttcgagagagaagctttgaaacactctttttccagaatgtgcaagtggacatttggggagctttgaggcctgtggagggaaaggaattatcttcccgtaaaagctagatagaagcattgtcagaaacttctttgtgatgattgcattcaactcacagagttgaaggttccttttcaaacagcagtttccaatcactctttctgtggaatctgcaagtggatatttgggcctctctgaggatttcgttggaaacgggataaaacgcacagaactaaaacagaagcattctcagaaacttctctgtgatgtttgtgttcaactcccagagtttcacgttgcttttcatagagtagttctgaaacatgcttttcgtagtgtctgcaagtggacatttggagcgctttcaggcctgtggtggaaaacgaattatggtcacataaaaactggagagaagccttctcagaaacttctctgtgatgattgcattcaactcacagagttgaaccctcctatggatagagcagtgttgaaactctctttttgtggaatctgcaagtggatatgtggacctctccgaagatgtctttggaaacgggaatatcttcacataaaaactaaacagaagcattctcagaaacttcttggtgatgtttgcattcaaatcccagagtcgaaccttcctttgatagttcaggtttgaaacactctttttgtaggatctgcaagtggatatttggaccactctgtggccttcgttcgaaacgggtatatcttcgcataaaatctagacagaagcattctcagaaaatactttgtgatgattgagtttaactcacagagctgaacattcctttggatggagcaggtttgagacacactttttgtagaatctacaagtggatatttggacctctctgaggatttcgttggaaacgggataactgcacctaactaaacggaagcattctcagaaactgctttgtgatgattgcattcacctcacagagttgaacattcctattgatagagcagtttggaaacactcttgttgtggaatgtgcaagtggagatttggagcgctttgaggcctatggtagtaaagggaatagcttcatagaaaaactagacagatgcattctcaggaactttttggtgatgtttgtattcaactcccagagttgaactttcctttggaaagagcagctatgaaacactctttttctagaatctgcaagtggacgtttggagggctttgtggtttgtggtggaaaaggaaatatcttcacctaaatactagatagaagcattctcagaagcttctctgtgatgactgcattcaactcacggagttgaacactccttttgagagcgtagttttgaaactctctttctgtggcatctgcaaggggacatgtagacctctttgaagatttcgttggaaacggaatcatcttcacataaaaactatacagaagcagtctcagaatcttctttgtgatgtttgcattcaaatcccagagttgaactttcctttcaaagttcacgtttgaaacactctttttgcaggatctacaagtggatatttggaccactctgtgtcctccgttcgaaacgggtatatcttcacatgacatctagacagaagctttctcagaaaattctttgggatgattgagtggaactcacagagctgaacattccttgagatgtagcagtttagaaacacactttctgcagaatctgcaagtgcatatgtggacctctctgaggaattcgttggaaacgggataatttcagctgactaaacagaagcattctcagaaccttcttcgtgatgtctgcattcaactcacagtgtggaacctttctttgatagttcaggtttgaaacactctttttgtagaaactgcaaggggataattgcactctttgaggagtaccgtagtaaaggaaataacttcctataaaaagaagacagaagcattctcagaaccctcttcgtggtgtttgcattcaactcacagtgctgaacctctctttgatagttcagctttgaaacactcttcttgtagaaactgcaagtggatatttggtcctctctgaggatttccttggaaaagggataaaccgcacagaactaaacagaagcattctcagaaccttcttcgtgatgtttgcattcaactcacagtgctgaacctttctttgatagttcaggtttgaaacggtctttctgtagaaactgcaagtagatatttggacctctctgaggatttcgttggaaacgggataaaccgcacagaactaaaacagaagcattcacagaaaactcttggtgacgactgagtttaactcacagagctgaacattcctttggatggagcagtttcgaaacacactatttgtagaatgtgcaagtggatatttggacctctctgaggatttcgttggaaacgggataaaccgcacagaactaaacagaagcattctcagaaactactttgtgatgattgcattcaagtcacagagttgaacattccctttgacagagcagtttggaaactctctttgtgtagaatctgcaagtggagatatggaccgctttgaggcctatggtagtaaaggaaatagcttcatataaaagctagacagtagcattctcagaaacttctttgtgatgcttgcattcaactcacagagttgaactttcctttcgagagagaagctttgaaacactctttttccagaatctgcaagtggacatttggagggctttgaggcctgtggtggaaaaggaattatcttcccgtaaaagctagatagaagcattgtcagaaacttctttgtgatgattgcattcaactcacagagttgaaggttgcttttccaacagcagtttccaaacactctttctgtggaatctgcaagtggatatttggacctctttgaagatttcgttggaaaagggataatcttcacagaaaaggtaaacagaagcattctcagaaacttctctgtgatgtttgtgttcaactcccagagtgtcacattgcttctcatagagtagttctgaaacatgcttttcgtagtgtctgcaaggggacatttggagcgctttcaggcctgtggtggaaaacgaattatggtcacataaaaactggagagaagccttctcagaaacttctctgtgatgattgcattcaactcacagagttgaactcacctatggatagagcagtgttgaaactctctttgtgtggaatctgcaagtggatatgtggacctctccgaagatgtctttggaaacgggactatcttcacataaaaactaaacagaagcattctcagaaacttcttggtgatgtttgcattcaaatcccagagttgaaccttcctttgatagttcaggtttgaaacactctttttgtaggatctgcaagtggatatttggaccactctgtggccttcgttcgaaacgggtacatcttcgcataaaatctagacagaagcattctcagaaaatactttgtgatgattgagtttaactcacagatctgaacattcctttggatggagcaggtttgagacacactttttgtaaaatctacaagtggatatttggacctctctgaggatttcgttggaaacgggataactgcacctaactaaacggaagcattctcagaaactgctttgtgatgattgcattcacctcacagagttgaacattcctattgatagagcagtttggaaacactcctgttgtggaatgtgcaagtggagatttggagcgctttgaggcctatggtagtaaagggaataacttcatagaaaaactagacagatgcattctcaggaactttttggtgatgtttgtattcaactcccagagttgaactttcctttggaaagagcagctatgaaacactctttttctagaatctgcaagtggacgtttggagggctttgtggtttgtggtggaaaaggaaatatcttcacctaaatactagatagaagcattctcagaagcttctctgtgattactgcattcaactcatggagttgaacactccttttgagagcgcagttttgaaactctgtttctgtggcatctgcaaggggacatgtagacctctttgaagatttcgttggaaacggaatcatcttcacataaaaactatacagaagcagtctcagaatcttctttgtgatgtttgcattcaaatcccagagttgaactttcctttcaaagttcacgtttgaaacactctttttgcaggatctacaagtggatatttggaccactctgtgtccttcgttcgaaacgggtatatcttcacatgacatctagacagaagctttctcagaaaattctttgggatgattgagttgagcaaacagagctgaacactccttgcgatgtagcagtttagaaacacactttctgcagaatctgcaagtgcatatgtggacctctctgaggtattcgttggaaacgggataatttcagctgactaaacagaagcattctcagaaccttcttcgtgatgtctgcattcaactcacagtgtggaacctttctttgatagttcaggtttgaaacactctttttgtagaaactgcaaggggatcattgcactctttgaggagtaccgtagtaaaggaaataacttcctataaaaagaagacagaagaattctcagagccctcttcgtgatgtttgcattcaactcacagtgctgaacctttctttgatagtgcagctttgaaacactctttttgtagaaactgcaagtggatgtttggtcctctctgaggatttcgttggaaacgggataaaccgcacagaactaaaacagaagcattctcagaaccttcttcgtgatgtttgcattcaactcacagtgttgaacctttctttgatagttcaggttggaaacggtctttctgtagaaactgcaagtagatatttggacctctctgaggatttcgttggaaacgggataaaccgcacagaactaaaacagaagcattcacagaaaactcttggtgacgactgagtttaactcacagagctgaacattcctttggatggagcagtttcgaaacacactctttgtagaatctgcaagtggatatttgggcctctctgaggatttcgttggaaatgggataaaccgcacagaactaaaacagaaagcattctcagaaactactttgtgatgattgcattcaagtcacagagttgaacattccctttgacagagcagtttggaaactctctttgtgtaggatctgcaagtggagatatggaccgctttgaggcctatggtagtaaaggaaatagcttcatataaaagctagacagtagcattctcagaaacttctttgtgatgcttgcattcaactcactgagttgaactttcctttcgagagagaagctttgaaacactctttttcctgaatctgcaagtggacatttggagggctttgaggcctgtggtggaaaaggaattatcttcccgtaaaagctagatagaagcattgtcagaaacttctttgtgatgattgcattcaactcacagagttgaaggttgcttttcaaacagcagtttccaaacactctttctgtggaatctgcaagtggatatttggacctctttgaagatttcgttggaaacgggataatcttcacagaaaagctaaacagaagcattctcagaaacttctccgtgatgtttgtgttcaactcccagagtgtcacattgcttttcatagagtagttctgaaacgagcttttcgcagtgtctgcaagtggacatttggagcgctttcaggcctgtggtggaaaacgaattatggtcacataaaaactggagagaagccttctcagaaacttctctgtgatgattgcattcaactcacagagttgaaccctactatggatagagcagtgttgaaactctctttttgtggaatctgcaagtggatatgtggacctctccgaagatgtctttggaaaggggactatcttcacataaaaactaaacagaagcattctcagaaacttcttggtgatgtttgcattcaaatcccagagttgaaccttcctttgatagttcaggtttgaaacactctttttgtaggatctgcaagtggatatttggaccactctgtggccttcgttcgaaacgggtacatcttcgcataaaatctagacagaagcattctcagaaaatactttgtgatgattgagtttaactcacagagctgaacattcctttggatggagcaggcttgagacacactttttgtagaatctacaagtggatatttggacctctctgaggatttcgttggaaacgagataactgcacctaactaaacggaagcattctcagaaactgctttgtgatgattgcattcacctcacagagttgaacattcctattgatagagcagtttggaaacactcttgttgtggaatgtgcaagtggagatttggagcgctttgaggcctatggtagtaaagggaatagcttcagagaaaaactagacagatgcattctcaggaactttttggtgatgtttgtattcaactcccagagttgaactttcctttggaaagagcagctatgaaacactctttttctagaatctgcaagtggacgtttggaggggtttgtggtttgtggtggaaaaggaaatatcttcacctaaatactagatagaagcattctcagaagcttctctgtgatgactgcattcaactcacggagttgaacactccttttgagagcgcagttttgaaactctctttctgtggcatccgcaaggggacatgtggacctctttgaagatttcgttggaaacggaatcatcttcacataaaaactatacagaagcagtctcagaatcttctttgtgatgtttgcattcaaatcccagagttgaacttgcctttcaaagttcacgtttgaaacactctttttgcaggatctacaagtggatatttggaccactctgtgtccttcgttcgaaacgggtatatcttcacatgacatctagacagaagctttctcagaaaattctttgggatgattgagttgaactcacagagctgagcatttccttgcgatgtagcagtttagaaacacactttctgcagaatctgcaagtgcatatttggacctctgtgaggaattcgttggaaacgggataatttcagctgactaaacagaagcattctcagaaccttcttcgtgatgtctgcattcaactcacagtgtggaacctttctttgatagttcaggtttgaaacactctttctgtagaaactgcaaggggataattgcactctttgaggagtaccgtagtaaaggaaataacttcctataaaaagaagacagaagaattctcagagccctcttcgtgatgtttgcattcaactcacagtgctgaacctttctttgatagtgcagctttgaaacactctttttgtagaaactgcaagtggatgtttggtcctctctgaggatttcgttggaaacgggataaaccgcacagaactaaaacagaagcattctcagaaccttcttcgtgatgtttgcattcaactcacagtgttgaacctttctttgatagttcaggtttcaaacggtctttctgtagaaactgcaactagatatttggacctctctgaggatttcgttggaaacgggataacccgcacagaactaaaacagaagcattcacagaaaactcttggtgacgactgagtttaactcacagagctgaatattcccttggatggagcagtttcgaaacacactctttgtagaatctgcaggtggatatttgggcctctctgaggatttcgttggaaacgggatatactgcagagaactaaaacagaagcattctcagaaactactttgtgatgattgcattcaagtcacagagctgaacattccctttgacggagcagtttggaaactctctttgtgtagaatctgcaagtggagatatggaatgctttgaggactatggtagtaaagggaatagcttcatataaacgctagacagtagcattctcagaaacttctttgtgatgcttgcattcaactcacagagttgaacattcctttcgagagagaagctttgaaacactctttttccagaatctgcaagtggacatttggagggctttgaggcctgtggtggaaaaggaattatcttcccgtaaaagctagatagaagcattgtcagaaacttctttgtgatgattgcattcaactcacagagttgaaggttccttttcaaacagcagtttccaatcactctttctgtggaatctgcaagtggatatttcgacctctttgaagatttcgttggaaacgggagaatcttcacagaaaagctcaacagaagcattctcagaaacttctctgtgatgtttgtgttcaactcccagagtttcacattgcttttcatagagtagttctgaaacatgcttttcgtagtgtctacaagtggacatttggagcgctttcaggcctgtggtggaaaacgaattatggtcacataaaaactggagagaagccttctcagaaacttctctgtgatgattgcattcaactcacagagttgaaccctcctatggatagagcagtgttgaaactctctttttgtggaacctgcaagtggatatgtggacctctccgaagatgtctttggaaacgggaatatcttcacataaaaactaaacagaaggattctcagaaacttcttggtgatgtttgcattcaaatcccagagttgaaccttcctttgatagttcaggtttgaaacactctttttgtaggatctgcaagtggctatttggaccactctgtggcattcgttcaaaacgggtatatcttcgcataaaatctagacagaagcattctcagaaaatactttgtgatgattgagttgaactcacagagctgaacattcctttggatggagcaggtttgagacacactttttgtagaatctacaagtggatatttggacctctctgaggatttcgttggaaacgggataactgcacctaactaaacggaagcattctcagaaactgctttgtgatgattgcattcacctcacagagttgaacattcctattgatagagcagtttggaaacactcttgttgcggaatgtgcaagtggagatttggagcgctttgaggcctgtggtagtaaagggaatagcttcatagaaaaactagacagatgcattctcaggaactttttggtgatgtttgtattcaactcccagagttgaactttcctttggaaagagcagctatgaaacactctttttctagaatctgcaagtggacgtttggagggctttgtggtttgtggtggaaaaggaaatatcttcacctaaatactagatagaagcattctcagaagcttctctgtgatgactgcattcaactcacggagttgaacactccttttgagagcgcagttttgaaactctctttctgtggcatctgcaaggggacatgtagacctctttgaagatttcgttggaaacggaatcatcttcacataaaaactatacagaagcagtctcagaatcttctttgtgatgtttgcattcaaatcccagagttgaactttcctttcaaagttcacgtttgaaacactctttttgcaggatctacaagtggatatttggaccactctgtgtccttcgttcgaaacgggtatatcttcacacgacatctagacagaagctttctcagaaaattctttgggatgattgagttgaactcacagagctgagcattccttgcgatgtagcagtttagaaacacactttctgcagaatctgcaagtgcatatttggacctctgtgaggaattcgttggaaacgggataatttcagctgactaaacagaagcattctcagaaccttcttcgtgatgtctgcattcaactcacagtgtggaacctttctttgatagttcaggtttgaaacactctttttgtagaaactgcaaggggataattgcacttctttgaggcctaccgtagcaaaagaaataacttcctataaaaagaagacagaagcattctcagaaccctcttcgtgatgtttgcattcaactcacagtgctgaacctttctttgatagttcagctttgaaacactcttcttgtagaaactgcaagtggatatttggtcctctctgaggatttcgttggaaacgggataaaccgcacagaactaaacagaagcattctcagaaccttcttcgtgatgtttgcattcaactcacagtgttgaacctttctttgatagttcaggtttgaaacggtctttctgtagaaactgcaagtagatatttggacctctctgaggatttcgttggaaacgggataacccgcacagaactaaaacagaagcattcacagaaaactcttggtgacgactgagtttaactcacagagctgaacattcctttggatggagcagtttcgaaacacactatttgtagaatgtgcaagtggatatttgggcctctctgaggatttcgttggaaacgggataaaccgcacagaactaaacagaagcattctcagaaactactttgtgatgattgcattcaagtcacagagttgaacattccctttgacagagcagtttggaaactctctttgtgtagaatctgcaagtggagatatggaccgctttgaggcctatggtagtaaaggaaatagcttcatataaaagctagacagtagcattctcagaaacttctttgtgatgcttgcattcaactcacagagttgaactttcctttcgagagagaagctttgaaacactctttttccagaatctgcaagtggacatttggagggctttgaggcctgtggtggaaaaggaattatcttcccgtaaaagctagatagaagcattgtcagaaacttctttgtgatgattgcattcaactcacagagttgaaggttccttttcaaacagcagtttccaatcactctttctgtggaatctgcaagtggatatttgggcctctctgaggatttcgttggaaacgggataaaacgcacagaactaaaacagaagcattctcagaaacttctctgtgatgtttgtgttcaactcccagagtttcacgttgcttttcatagagtagttctgaaacatgcttttcgtagtgtctgcaagtggacatttggagcgctttcaggcctgtggtggaaaacgaattatggtcacataaaaactggagagaagccttctcagaaacttctctgtgatgattgcattcaactcacagagttgaaccctcctatggatagagcagtgttgaaactctctttttgtggaatctgcaagtggatatgtggacctctccgaagatgtctttggaaacgggaatatcttcacataaaaactaaacagaagcattctcagaaacttcttggtgatgtttgcattcaaatcccagagttgaaccttcctttgatagttcaggtttgaaacactctttctgtaggatctgcaagtggctatttggaccactctgtggccttcgttcgaaacgggtatatcttcgcataaaatctagacagaagcattctcagaaaatactttgtgatgattgagtttaaatcacagagctgaccattcctttggatggagcaggtttgagacacactttttgtagaatctacaagtggatatttggacctctctgaggatttcgttggaaacgggataactgcacctaactaaacggaagcattctcagaaactgctttgtgatgattgcattcacctcacagagttgaacattcctattgatagagcagtttggaaacactcttgttgtggaatgtgcaagtggagatttggagcgctttgaggcctatggtagtaaagggaatagcttcatagaaaaactagacagatgcattctcaggaactttttggtgatgtttgtattcaactcccagagttgaactttcctttggaaagagcagctatgaaacactctttttctagaatctgcaagtggacgtttggagggctttgtggtttgtggtggaaaaggaaatatcttcacctaaatactagatagaagcatcctcagaagcttctctgtgatgactgcattcaactcacggagttgaacactccttttgagagcgcagttttgaaactctctttctgtggcatctgcaaggggacatgtagacctctttgaagatttcgttggaaacggaatcatcttcacataaaaactatacagaagcagtctcagaatcttctttgtgatgtttgcattcaaatcccagagttgaactttcctttcaaagttcacgtttgaaacactctttttgcaggatctacaagtggatatttggaccactctgtgtccttcgttcgaaacgggtatatcttcacatgacatctagacagaagctttctcagaaaattctttggcatgattgagttgaactcacagagctgaacattccttgcgatggagcagtttagaaacacactttctgcagaatctgcaagtgcatatttggacctctctgaggaattcattggaaacgcgataatttcagctgactaaacagaagcattctcagaaccttcttcgtgatgtctgcattcaactcacagtgtggaacctttctttgatagttcaggtttgaaacactctttttgtagaaactgcaaggggataattgcacttctttgaggcctaccgtagtaaaggaaataacttcctatagaaagaagacagaagcattcccagaaccctcttcgtgatgtttgcattcaactcacggtgctgaacctttctttgatagttcagctttgaaacactctttttgtagaaactgcaagtggatatttggtcctctctgaggatttcgttggaaaagggataaaccgcacagaactaaacagaagctttctcagaaccttcttcgtgatgtttgcattcaactcacagtgttgaacctttctttgatagttcaggtttgaaacggtctttctgtagaaactgcaagtagatatttggacctctctgaggatttcgttggaaacgggataaaccgcacagaactaaaacagaagcattcacagaaaacacttggtgacgactgagtttaactcacagagctgaacattcctttggagggagcagttttgaaacacactatttgtagaatctgcaagtggatatttgggcctctctgaggatttcgatggaaacgggataaaccgcacagatataaaacagaagcattctcagaaactactttgtgatgattgcattcaagtcacagagcagaacattccctttgacagagcagtttggaaactctctttgtgtagcatctgcaagtggagatatggaatgctttgaggactatggtagtaaaggaaatagcttcatataaaagctagacagtagcattctcagcaaacttctttgtgatgcttgcattcaactcacagagttgaactttcctttcgagagagaagctttgaaacactctttttccagaatctgcaagtggacatttggagggctttgaggcctgtggtggaaaaggaattatcttcccgtaaaagctagatagaagcattgtcagaaacttctttgtgatgattgcattcaactcacagagttgaaggttccttttcaaacagcagtttccaatcactctttctgtggaatctgcaagtggatatttcgacctctttgaagatttcgttggaaacgggagaatcttcacagaaaagctaaacagaagcattctcagaaacttctctgtgatgtttgtgttcaactcccagagtttcacattgcttttcatagagtagttctgaaacatgcttttcgtagtgtctgcaagtggacatttggagcgctttcaggcctgtggtggaaaacgaattatggtcacataaaaactggagagaagccttctcagaaacttctctgtgatgattgcattcaactcacagagttgaaccctcctatggatagagcagtgttgaaactctctttttgtggaatctgcaagtggatatgtggacctctccgaagatttctttggaaacgggactatcttcacataaaaactaaacagaagcattctcagaaacttcttggtgatgtttgcattcaaatcccagagttgaaccttcctttgatagttcaggtttgaaacactctttttgtaggatctgcaagtggctatttggaccactctgtggccttcgttcgaaacggatatatcttcgcataaaatctagacagaagcattctcagaaaatactttgtgatgattgagttgaactcacagagctgaacattcctttggatggagcaggtttgagacacactttttgtagaatctacaagtggatatttgggcctctctgaggatttcgttggaaacgggataactgcacctaactaaacggaagcattctcagaaactgctttgtgatgattgcattcacctcacagagttgaacattcctattgatagagcagtttggaaacactcttcttgtggaatgtgcaagtggagatttggagcgctttgaggcctatggtagtaaagggaatagcttcatagaaaaactagacagatgcattctcaggaactttttggtgatgtttgtattcaactcccagagttgaactttcctttggaaagagcagctatgaaacactctttttctagaatctgcaagtggacgtttggagggctttgtggtttgtggtggaaaaggaaatatcttcacctaaatactagatagaagcatcctcagaagcttctctgtgatgactgcattcaactcacggagttgaacactccttttgagagcgcagttttgaaactctctttctgtggcatctgcaaggggacatgtagacctctttgaagatttcgttggaaacggaatcatcttcacataaaaactatacagaagcagtctcagaatcttctttgtgatgtttgcattcaaatcccagagttgaactttcctttcaaagttcacgtttgaaacactctttttgcaggatctacaagtggatatttggaccactctgtgtccttcgttcgaaacgggtatatcttcacatgacatctagacagaagctttctcagaaaattctttgcgatgattgagttgaactcacagagctgagcattccttgcgatgtagcagtttagaaacacactttctgcagaatctgcaagtgcatatttggacctctgtgaggaattcgttggaaacgggataatttcagctgactaaacagaagcattctcagaaccttcttcgtgatgtctgcattcaactcacagtgtggaacctttctttgatagttcaggtttgaaacactctttctgtagaaactgcaaggggataattgcactctttgaggagtaccgtagtaaaggaaataacttcctataaaaagaagacagaagcattctcagaaccctcttcgtgatgtttgcattcaactcacagtgctgaacctttctttgatagttcagctttgaaacactctttttgtagaaactgcaagtggatatttggtcctctctgaggatttcgttggaaacgggataaactgcacagaactaaacagaagcattctcagaaccttcttcgtgatgtttgcattcaactcacagtgttgaacctttctttgatagttcaggtttgaaacggtctttctgcagaaactgcaagtagatatttggacctctctgaggatttcgttggaaacgggataccccgcacagaactaaaacagaagcattcacagaaaactcttggtgacgactgagtttaactcacagagctgaacactcctttggagggagcagtttcgaaacacactatttatagaatgtgcaagtggatatttgggcctctctgaggatttcgttggaaacgggataaatggcaaagaaataaacagaagcattctcagaaactactttgtgatgattgcattcaagtcacagagttgaacattccctttgacagagcagtttggaaactctctttgtgtagaatctgcaagtggagatatggaccgctttgaggcctatggtagtaaaggaaatagcttcatataaaagctagacagtagcattctcagaaacttctttgtgatgcttgcattcaactcacagagttgaactttcctttcgagagagaagctttgaaacactctttttccagaatctgcaagtggacatttggagggctttgaggcctgtggtggaaaaggaattatcttcccgtaaaagctagatagaagcattgtcagaaacttctttgtgatgattgcattcaactcacagagatgaaggttcctttacaaacagcagtttccaaacactctttctgtggaatctgcaagtggatatttggacctctttgaagatttcgttggaaacgggagaatcttcacagaaaagctaaacagaagcattctcagaaacttctctgtgatgtttgtgttcaactcccagagtttcacgttgcttttcatagagtagttctgaaacatgcttttcgtagtgtctgcaagtggacatttggagcgctttcaggcctgtggtgcaaaacgaattatggtcccataaaaactggagagaagccttctcagaaacttctctgtgatgattgcattcaactcacagatttgaaccctcctatggatagagcattgttgaaactctctttttgtggaatctgcaagtggatatgtggacctctccgaagatgtctttggaaacgggaatatcttcacataaaaactaaacagaagcattctcagaaacttcttggtgatgtttgcattcaaatcccagagttgaaccttcctttgatagttcaggtttgaaacactctttttgtaggatctgcaagtggatatttggaccactctgtggccttcgttcgaaacgggtatatcttcgcataaaatctagacagaagcattctcagaaaatactttgtgatgattgagtttaaatcacagagctgaccattcctttggatggagcaggtttgagacacactttttgtagaatctacaagtggatatttggacctctctgaggatttcgttggaaacgggataactgcacctaactaaacggaagcattctcagaaactgctttgtgatgattgcattcacctcacagagttgaacattcctattgatagagcagtttggaaacactcttgttgtggaatgtgcaagtggagatttggagcgctttgaggcctgtggtagtaaagggaatagcttcatagaaaaactagacagatgcattctcaggaaccttttggtgatgtttgtattcaactcccagagttgaactttcctttggaaagagcagctatgaaacactctttttctagaatctgcaagtggacgtttggagggctttgtggtttgtggtggaaaaggaaatatcttcacctaaatactagatagaagcattctcagaagcttctctgtgatgactgcattcaactcacggagttgaacactccttttgagagcgcagttttgaaactctctttctgtggcatctgcaaggggacatgtagacctctttgaagatttcgttggaaacggaatcatcttcacataaaaactatacagaagcagtctcagaatcttctttgtgatgtttgcattcaaatcccagagttgaactttcctttcaaagttcacgtttgaaacactctttttgcaggatctacaagtggatatttggaccactctgtgtccttcgttcgaaacgggtatatcttcacacgacatctagacagaagctttctcagaaaattctttgggatgattgagttgaactcacagagctgaacattccttgcaatgtagcagtttaggaacacactttctgcagaatctgcaagtgcatatgtggacctctctgaggaattcgttggaaacgggataatttcagctgactaaacagaagcattctcagaaccttcttcgtgatgtctgcattcaactcacagtgtggaacctttctttgatagttcaggtttgaaacactctttttgtagaaactgcaaggagataattgcacttctttgaggcctaacgtagtaaaggaaataacttcctataaaaagaagacagaagcattctcagaaccctcttcgtgatgtttgcattcaacccacggtgctgaacctttctttgatagttcagctttgaaacactctttttgtagaaactgcaagtggatatttggtcctctctgaggatttcgttggaaaagggataaaccgcacagaactaaacagaagcattctcagaaccttcttcgtgatgtttgcattcaactcacagtgttgaacctttctttgatagttcaggtttgaaacggtctttctgtagaaactgcaagtagatatttggacctctctgaggatttcgtttgaaacgggataaaccgcacagaactaaaacagaagcattcacagaaaactcttggtgacgactgagtttaactcacagagctgaacattcctttggatggagcagtttcgaaacacactatttgtagaatgtgcaagtggatatgtgggcctctctgaggatttcgttggaaacgggataaaccgcacagaactaaacagaagcattctcagaaactactttgtgatgattgcattcaagtcacagagttgaacattccctttgacagagcagtttggaaactctctttgtgtagaatctgcaagtggagatatggaccgctttgaggcctatggtagtaaaggaaatagcttcatataaaagctagacagtagcattctcagaaacttctttgtgatgcttgcattcaactcacagagttgaactttcctttcgagagagaagctttgaaacactctttttccagaatctgcaagtggacatttggagggctttgaggcctgtggtggaaaaggaattaacttcccgtaaaagctagatagaagcattgtcagaaacttctttgtgatgattgcattcaactcacagagttgaaggttccttttcaaacagcagtttccaatcactctttctgtggaatctgcaagtggatatttgggcctctctgaggatttcgttggaaacgggataaaacgcacagaactaaaacagaagcattctcagaaacttctctgtgatgtttgtgttcaactcccagagtttcacgttgcttttcatagagtagttctgaaacatgcttttcgtagtgtctgcaagtggacatttggagcgctttcaggcctgtggtggaaaacgaattatggtcacataaaaactggagagaagccttctcagaaacttctctgtgatgattgcattcaactcacagagttgaaccctcctatggatagagcagtgttgaaactctctttttgtggaatctgcaagtggatatgtggacctctccgaagatgtctttggaaacgggaatatcttcacataaaaactaaacagaagcattctcagaaacttcttggtgatgtttgcattcaaatcccagagttgaaccttcctttgatagttcaggtttgaaacactctttttgtaggatctgcaagtggatatttggaccactctgtggccttcgttcgaaacgggtatatcttcgcataaaatctagacagaagcattctcagaaaatactttgtgatgattgagtttaaatcacagagctgaacattcctttggatggagcaggtttgagacacactttttgtagaatctacaagtggatatttggacctctctgaggatttcgttggaaacgggataactgcacctaactaaacggaagcattctcagaaactgctttgtgatgattgcattcacctcacagagttgaacattcctattgatagagcagtttggaaacactcttgttgtggaatgtgcaagtggagatttggagcgctttgaggcctatggtagtaaagggaatagcttcatagaaaaactagacagatgcattctcaggaactttttggtgatgtttgtattcaactcccagagttgaactttcctttggaaagagcagctatgaaacactctttttctagaatctgcaagtggacgtttggagggctttgtggtttgtggtggaaaaggaaatatcttcacctaaatactagatagaagcattctcagaagcttctctgtgatgactgcattcaactcacggagttgaacactccttttgagagcgtagttttgaaactctctttctgtggcatctgcaaggggacatgtagacctctttgaagatttcgttggaaacggaatcatcttcacataaaaactatacagaagcagtctcagaatcttctttgtgatgtttgcattcaaatcccagagttgaactttcctttcaaagttcacgtttgaaacactctttttgcaggatctacaagtggatatttggaccactctgtgtccttcgttcgaaacgggtatatcttcacacgacatctagacagaagctttctcagaaaattctttgggatgattgagtggaactcacagagctgaacattccttgtgatgtagcagtttagaaacacactttctgcagaatctgcaagtgcatatttggacctctctgaggaattcgttggaaacgggataatttcagctgactaaacagaagcattctcagaaccttcttcgtgatgtctgcattcaactcacagtgtggaacctttctttgatagttcaggtttgaaacactctttttgtagaaactgcaaggggataattgcacttctttgaggcctaccgtagtaaaggaaataacttcctatagaaagaagacagaagcattctcagaaccctcttcgtgatgtttgcattcaactcacagtgctgaacctttctttgatagttcagctttgaaacactcttcttgtagaaactgcaagtggatatttggtcctctctgaggatttcgttggaaacgggataaaccgcacagaactaaacagaagcattctcagaaccttcttcgtgatgtttgcattcaactcacagtgttgaacctttctttgatagttcaggtttgaaacggtctttctgtagaaactgcaagtagatatttggacctttctgaggatttcgttggaaacgggataaaccgcacacaactaaaacagaagcattcacagaaaactcttggtgacgactgagtttaactcacagagctgaacattcctttggatggagcagtttcgaaacacactatttctagaaggtgcaagtggatatgtgggcctctctgaggatttcgttggaaacgggataaaccgcacagaactaaacagaagtattctcagaaactactttgtgatgattgcattcaagtcacagagttgaacattccctttgacagagcagtttggaaactctctttgtgtagaatctgcaagtggagatatggaccgctttgaggcctatggtagtaaaggaaatagcttcatataaaagctagacagtagcattctcagaaacttctttgtgatgcttgcattcaactcacagagttgaactttcctttcgagagagaagctttgaaacagtctttttccagaatctgcaagtggacatttggagggctttgaggcctgtggtggaaaaggaattatcttcccgtaaaagcctagatagaagcattgtcagaaacttctttgtgatgattgcattcaactcacagagttgaaggttccttttcaaacagcagtttccaatcactctttctgtggaatctgcaagtggatatttgggcctctctgaggatttcgttggaaacgggataaaacgcacagaactaaaacagaagcattctcagaaacttctctgtgatgtttgagttcaactcccagagtgtcacattgcttctcatagagtagttctgaaacatgcttttcgtagtgtctgcaaggggacatttggagcgctttcaggcctgtggtggaaaacgaattatggtcacataaaaactggagagaagccttctcagaaacttctctgtgatgattgcattcaactcacagagttgaaccctcctatggatagagcagtgttgaaactctctttttgtggaatctgcaagtggatatgtggacctctccgaagatgtctttggaaacgggactatcttcacataaaaactaaacagaagcattctcagaaacttcttggtgatgtttgcattcaaatcccagagttgaaccttcctttgatagttcaggtttgaaacactctttttgtaggatctgcaagtggatatttggaccactctgtggccttcgttcgaaacgggtacatcttcacataaaatctagacagaagcattctcagaaaatactttgtgatgattgagtttaactcacagagctgaacattcctttggatggagcaggtttgagacacactttttgtagaatctacaagtggatatttcgacctctctgaggatttcgttggaaacgggataactgcacctaactaagcggaagcattctcagaaactgctttgtgatgattgcattcacctcacagagttgaacattcctattgatagagcagtttggaaacactcttgttgtggaatgtgcaagtggagatttggagcgctttgaggcctatggtagtaaagggaatagcttcatagaaaaactagacagatgcattctcaggaactttttggtgatgtttgtattcaactcccagagttgaactttcctttggaaagagcagctatgagacactgtttctctagaatctgcaagtggacgtttggagggctttgtggtttgtggtggaaaaggaaatatcttcacctaaatactagatagaagcattctcagaagcttctctgtgatgactgcattcaactcacggagttgaacactccttttgagagcgtagttttgaaactctctttctgtggcatctgcaaggggacatgtagacctctttgaagatttcgttggaaacggaatcatcttcacataaaaactatacagaagcagtctcagaatcttctttgtgatgtttgcattcaaatccccgagttgaactttcctttcaaagttcacgtttgaaacactctttttgcaggatctacaagtggatatttggaccactctgtgtccttcgttcgaaacggttatatcttcacatgacatctagacagaagctttctcagaaaattctttgggatgattgagttgaactcacagagctgagcattccttgcgatgtagcagtttagaaacacactttctgcagaatctgcaagtgcatatttggacctctgtgaggaattcgttggaaacgggataatttcagctgactaaacagaagcattctcagaaccttcttcgtgatgtctgcattcaactcacagtgtggaacctttctttgatagttcaggtttgaaacactctttttgtagaaactgcaaggggataattgcacttctttgaggcctaccgtagtaaaggaaataacttcctatagaaagaagacagaagcattctcagaaccctcttcgtgatgtttgcattcaactcacagtgctgaacctttctttgatagttcagctttgaaacactcttcttgtagaaactgcaagtggatatttggtcctctctgaggatttcgttggaaacgggataaaccgcacagaactaaacagaagcattctcagaaccttcttcgtgatgtttgcattcaactcacagtgttgaacctttctttgatagttcaggtttgaaacggtctttctgtagaaactgcaagtagatatttggacctctctgaggatttcgttggaaacgggataacccgcacagaactaaaacagaagcattcacagaaaactcttggtgacgactgagtttaactcacagagctgaacattcctttggatggagcagtttcgaaacacactatttgtagaatgtgcaagtggatatttgggcctctctgaggatttcgttggaaacgggataaaccgcacagaactaaacagaagcattctcagaaactactttgtgatgattgcattcaagtcacagagctgaacattccctttgacagagcagtttggaaactctctttgtgtagaatctgcaagtggagatatggaatgctttgaggactatggtagtaaaggaaatagcttcatataaaagctagacagtagcattctcagaaacttctttgtgatgcttgcattcaactcacagagttgaactttcctttcgagagagaagctttgaaacactctttttccagaatctgcaagtggacatttggagggctttgaggcctgtggtggaaaaggaattatcttcccgtaaaagctggatagaagcattgtcagaaacttctttgtgatgattgcattcaactcacagagttgaaggttccttttcaaagagcagtttccaatcactctttctgtggaatctgcaagtggatatttggacctattttgaagatttcgttggaaacgggagaatcttcacaggaaagctaaacagaagcattctcagaaacttctctgtgatgtttgtgttcaactcccagagtttcacattgcttttcatagagtagttctgaaacatgcttttcgtagtgtctacaagtggacatttggagcgctttcaggcctgtggtggaaaacgaattatggtcacataaaaactggagagaagccttctcagaaacttctctgtgatgattgcattcaactcacagagttgaaccctcctatggatagagcagtgttgaaactctctttttgtggaatctgcaagtggatacgtggacctctccgaagatgtctttggaaacgggaatatcttcacataaaaactaaacagaagcattctcagaaacttcttggtgatgtttgcattcaaatcccagagttgaaccttcctgtgatagttcaggtttgaaacactctttttgtaggatctgcaagtggatatttggaccactctgtggccttcgttccaaacgggtacatcttcacataaaatctagacagaagcattctcagaaaatactttgtgatgattgagtttaactcacagagctgaacattcctttggatggagcaggtttgagacacactttttgtagaatctacaagtggatatttggacctctctgaggatttcgttggaaacgcgataactgcacctaactaaacggaagcattctcagaaactactttgtgatgattgcattcacctcacagagttgaacattcctattgatagagcagtttggaaacactcttgttgtggaatgtgcaagtggagatttggagcgctttgaggcctatggtagtaaagggaatagcttcatagaaaaactagacagatgcattctcaggaactttttggtgatgtttgtattcaactcccagagttgaactttcctttggaaagagcagctatgaaacactgtttttctagaatctgcaagtggacgtttggagggctttgtggtttgtggtggaaaaggaaatatcttcacctaaatactagatagaagcattctcagaagcttctctgtgatgactgcattcaactcacggagttgaacactccttttgagagcgcagttttgaaactctctttctgtggcatccgcaaggggacatgtggacctctttgaagatttcgttggaaacggaatcatcttcacataaaaactatacagaagcagtctcagaatcttctttgtgatgtttgcattcaaatcccagagttgaactttcctttcaaagttcacgtttgaaacactctttttgcaggatctacaagtggatatttggaccactctgtgtccttctttcgaaacgggtatatctgcacatgacatctagacagaagctttctcagaaaattctttgggatgattgagttgaactcacagagctgaacattccttgcgatgtagcagtttagaaacacactttctgcagaatctgcaagtgcatttgtggacctctctgaggaattcgttggaaacgggataatttcagctgactaaacagaagcattctcagaaccttcttcgtgatgtctgcattcaactcacagtgtggaacctttctttgatagttcaggtttgaaacactctttttgtagaaactgcaaggggataattgcacttctttgaggcctaccgtagtaaaggaaataacttcctataaaaagaagacagaagcattctcagaaccctcttcgtgatgtttgcattcaacacacagtgctgaacctttctttgatagttcagctttgaaacactctttttgtagaaactgcaactggatatttggtcctctctgaggatttcgttggaaatgggataaaccgcacagtactaaacagaagcattctcagaaccttcttcgtgatgtttgcattcaactcacagtgttgaacctttctttgatagttcaggtttgaaacggtctttctgtagaaactgcaagtagatatttggacctctctgaggatttcgttggaaacgggataacccgcacagaactaaaacagaagcattcacagaaaactcttggtgacgactgagtttaactcacagagctgaacattcctttggatggagcagtttcgaaacacactatttgtagaatgtgcaagtggatatttaggcctctctgaggatttcgttggaaacgggataaaccgcacagaactaaacagaagcattctcagaaactactttgtgatgattgcattcaagtcacagagttgaacattccctttgacagagcagtttggaaactctctttgtgtagaatctgcaagtggagatatggaccgctttgaggactatggtagtaaaggaaatagcttcatataaaagctagacagtagcattctcagaaacttctttgtgatgcttgcattcaactcacagagttgaactttcctttcgagagagaagctttgaaacactctttttccagaatctgcaagtggacatttggagggctttgaggcctgtggtggaaaaggaattatcttcccgtaaaagctagatagaagcattgtcagaaacttctttgtgatgattgcattcaactcacagagttgaaggttccttttcaaacagcagtttccaatcactctttctgtggaatctgcaagtggatatttgggcctctctgaggatttcgttggaaacgggataaaacgcacagaactaaaacagaagcattctcagaaacttctctgtgatgtttgtgttcaactccgagagtttcacattgcttttcatagagtagttctgaaacatgcttttcatagtgtctgcaagtggacatttggagcgctttcaggcctgtggtggaaaacgaattatggtcacataaaaactggagagaagccttctcagaaacttctctgtgatgattgcattcaactcacagagtttaaccctcctatggatagagcagtgttgaaactctctttttgtggaatctgcaagtggatatgtggacctctccgaagatgtctttggaaacgggaatatcttcacataaaaactaaacagaagcattctcagaaacttcttggtgatgtttgcattcaaatcccagagttgaaccttcctttgatagttcaggtttgaaacactctttttgtaggatctgcaagtggatatttggaccactctgtggccttcgttcaaaacgggtacatcttcgcataaaatctagacagaagcattctcagaaaatactttgtgatgattgagttgaactcacagagctgaacattcctttggatggagcaggtttgagacacactttttgtagaatctacaagtggatatttggacctctctgaggatttcgttggaaacgggataactgcacctaactaaacggaagcattctcagaaactgctttgtgatgattgcattcacctcacagagttgaacattcctattgatagagcagtttggaaacactcttgttgtggaatgtgcaagtggagatttggagcgctttgaggcctgtggtagtaaagggaatagcttcatagaaaaactagacagatgcattctcaggaactttttggtgatgtttgtattcaactcccagagttgaactttcctttggaaagagcagctatgaaacactctttttctagaatctgcaagtggacgtttggagggctttgtggtttgtggtggaaaaggaaatatcttcacctaaatactagatagaagcattctcagaagcttctctgtgatgactgcattcaactcacggagttgaacactccttttgagagcgcagttttgaaactctctttctgtggcatctgcaaggggacatgtagacctctttgaagatttcgttggaaacggaatcatcttcacataaaaactatacagaagcagtctcagaatcttctttgtgatgtttgcattcaaatcccagagttgaactttcctttcaaagttcacgtttgaaacactctttttgcaggatctacaagtggatatttggaccactctgtgtccttcgttcgaaacgggtatatcttcacaggacatctagacagaagctttctcagaaaattctttgggatgattgagtggaactcacagagctgaacattccttgcgatggagcagtttagaaacacactttctgcagaatctgcaagtgcatatttggacctctctgaggaattcgttggaaacgggataatttcagctgactaaacagaagcattctcagaaccttcttcgtgatgtctgcattcaactcacagtgtggaacctttctttgatagttcaggtttgaaacactctttttgtagaaactgcaaggggataattgcacttctttgaggcctaccgtagtaaaggaaataacttcctatagaaagaagacagaagcattctcagaaccctcttcgtgatgtttgcattcaactcacagtgctgaacctttctttgatagttcagctttgaaacactcttcttgtagaaactgcaagtggatatttggtcctctctgaggatttcgttggaaacgggataaaccgcacagaactaaacagaagcattctcagaaccttcttcgtgatgtttgcattcaactcacagtgttgaacctttctttgatagttcaggtttgaaacggtctttctgtagaaactgcaagtagatatttggacctctctgaggatttcgttggaaacgggataacccgcacagaactaaaacagaagcattcacagaaaactcttggtgacgactgagtttaactcacagagctgaacattcctttggatggagcagtttcgaaacacactatttgtagaatgtgcaagtggatatttgggcctctctgaggatttcgttggaaacgggataaaccgcacagaactaaacagaagcattctcagaaactactttgtgatgattgcattcaagtcacagagttgaacattccctttgacagagcagtttggaaactctctttgtgtagaatctgcaagtggagatatggaccgctttgaggcctatggtagtaaaggaaatagcttcatataaaagctagacagtagcattctcagaaacttctttgtgatgcttgcattcaactcacagagttgaactttcctttcgagagagaagctttgaaacactctttttccagaatctgcaagtggacatttggagggctttgaggcctgtggtggaaaaggaattatcttcccgtaaaagctagatagaagcattgtcagaaacttctttgtgatgattgcattcaactcacagagttgaaggttccttttcaaacagcagtttccaatcactctttctgtggaatctgcaagtggatatttgggcctctctgaggatttcgttggaaacgggataaaacgcacagaactaaaacagaagcattctcagaaacttctctgtgatatttgtgttcaactcccagagtttcacattgcttctcatagagtagttctgaaacatgcttttcgtagtgtctgcaagtggtcatttggagcgctttccggcctgtggtggaaaacgaattatggtcacataaaaactggagagaagccttctcagaaacttctctgtgatgattgcattcaactcacagagttgaaccctcctatggatagagcagtgttgaaactctctttttgtggaatctgcaagtggatatgtggacctctccgaagatgtctttggaaacgggaatatcttcacataaaaactaaacagaagcattctcagaaacttcttggtgatgtttgcattcaaatcccagagttgaaccttcctttgatagttcaggtttgaaacactctttctgtaggatctgcaagtggctatttggaccactctgtggccttcgttcgaaacgggtatatcttcgcataaaatctagacagaagcattctcagaaaatactttgtgatgattgagtttaaatcacagagctgaccattcctttggatggagcaggtttgagacacactttttgtagaatctacaagtggatatttggacctctctgaggatttcgttggaaacgggataactgcacctaactaaacggaagcattctcagaaactgctttgtgatgattgcattcacctcacagagttgaacattcctattgatagagcagtttgaaaacactcttcttgtggaatgtgcaagtggagatttggagcgctttgaggcctatggtagtaaagggaatagcttcatagaaaaattagacagatgcattctcaggaactttttggtgatgtttgtattcaactcccagagttgaactttcctttggaaagagcagctatgaaacactctttttctagaatctgcaagtggacgtttggagggctttgtggtttgtggtggaaaaggaaatatcttcacctaaatactagatagaagcattctcagaagcttctctgtgatgactgcattcaactcacggggttgaacactccttttgggagcgcagttttgaaactctctttctgtggcatctgcaaggggacatgtagacctctttgaagatttcgttggaaacggaatcatcttcacataaaaactatacagaagcagtctcagaatcttctttgtgatgtttgcattcaaatcccagagttgaactttcctttcaaagttcacgtttgaaacactctttttgcaggatctacaagtggatatttggaccactctgtgtccttcgttcgaaacgggtatatcttcacatgacatctagacagaagctttctcagaaaattctttgggatgattgagttgaactaacagagctgaacattccttgcgatggagcagtttagaaacacactttctgcagaatctgcaagtgcatatttggacctctctgaggaattcgttggaaacgcgataatttcagctgactaaacagaagcattctcagaaccttcttcgtgatgtctgcattcaactcacagtgtggaacctttctttgatagttcaggtttgaaacactctttttgtagaaactgcaaggggataattgcactctttgaggagtaccgtagtaaaggaaataacttcctataaaaagaagacagaagcattctcagaaccctcttcgtgatgtttgcattcaactcacagtgctgaacctttctttgatagttcagctttgaaacactcttcttgtagaaactgcaagtggatatttggtcctctctgaggatttcgttggaaacgggataaaccgcacagaactaaacagaagcattctcagaaccttcttcgtgatgtttgcattcaactcacagtgctgaacctttctttgatagttcagctttgaaacactcttcttgtagaaactgcaagaggatacttggtgttctctgaggatttcgttggaaaagggataaaccgcacagaactaaacagaagcattcacagaaaacccttggtgacgactgagtttaactcacagagctgaacattcctttggatggagcagtttcgaaacatactatttgtagaatctgcaagtggatatttgggcctctctgaggatttcgatggaaacgggataaaccgcacagaactaaaacagaagcattctcagaaactactttgtgatgattgcattcaagtcacagagttgaacattccctttgacagagcagtttggaaactctctttgtgtagaatctgcaagtggagatatggaccgctttgaggcctatggtagtaaaggaaatagcttcatataaaagctagacagtagcattctcagaaacttctttgtgatgcttgcattcaactcactgagttgaactttcctttcgagagagaagctttgaaacagtctttttccagaatctgcaagtggacatttggagggctttgaggcctgtggtggaaaaggaattatcttcccgtaaaagctagatagaagcattgtcagaaacttctttgtgatgattgcattcaaatcacagagttgaaggttccttttcaaacagcagtttccaaacactctttctgtggaatctgcaagtggatatttggacctctttgaagatttcgttggaaacgggaaagtcttcacagaaaagttaaacagaagcattctcagaaacttctctgtgatgtttgtgttcaactcccagagtttcacattgcttctcatagagtagttctgaaacatgcttttcgtagtgtctgcaagtggacatttggagcgctttcaggcctgtggtggaaaacgaattatggtcccataaaaactggagagaagccttctcagaaacttctctgtgataattgaattcaactcacagagttgaaccgtcctatggatagagcagtgttgaaactctctttttgtggaatctgcaagtggatatgtggacctctccgaagatgtctttggaaacgggaatatcttcacataaaaactaaacagaagcattctcagaaacttcttggtgatgtttgcattcaaatcccagagttgaaccttcctttgatagttcaggtttgaaacactctttctgtaggatctgcaagtggctatttggaccactctgtggccttcgttcgaaacgggtatatcttcgcataaaatctagacagaagcattctcagaaaatactttgtgatgattgagtttaaatcacagagctgaccattcctttggatggagcaggtttgagacacactttttgtagaatctacaagtggatatttggacctctctgaggatttcgttggaaacgggataactgcacctaactaaacggaagcattctcagaaactgctttgtgatgattgcattcacctcacagagttgaacattcctattgatagagcagtttggaaacactcttgttgtggaatgtgcaagtggagatttggagcgctttgaggcctgtggtagtaaagggaatagcttcatagaaaaactagacagatgcattctcaggaactttttggtgatgtttgtattcaactcccagagttgaactttcctttggaaagagcagctatgaaacactctttttctagaatctgcaagtggacgtttggagggctttgtggtttgtggtggaaaaggaaatatcttcacctaaatactagatagaagcattctcagaagcttctctgtgatgactgcattcaactcacggagttgaacactccttttgagagcgcagttttgaaactctctttctgtggcatctgcaaggggacatgtagacctctttgaagatttcgttggaaacggaatcatcttcacataaaaactatacagaagcagtctcagaatcttctttgtgatgtttgcattcaaatcccagagttgaactttcctttcaaagttcacgtttgaaacactctttttgcaggatctacaagtggatatttggaccactctgtgtccttcgttcgaaacgggtatatcttcacacgacatctagacagaagctttctcagaaaattctttgggatgattgagtggaactcacagagctgaacattccttgcgatgtagcagtttagaaacacactttctgcagaatctgcaagtgcatatttggacctctctgaggaattcgttggaaacgggataatttcagctgactaaacagaagcattctcagaaccttcttcgtgatgtctgcattcaactcacagtgtggaacctttctttgatagttcaggtttgaaacactctttttgtagaaactgcaaggggatcattgcacttctttgaggcctaccgtagtaaaggaaataacttcctataaaaagaagacagaagcattctcagaaccctcttcgtgatgtttgcattcaactcacagtgctgaacctttctttgatagttcagctttgaaacactctttttgtagaaactgcaagtggatatttggtcctctctgaggatttcgttggaaacgggataaaacgcacagaactaaacagaagcattctcagaaccttcttcgtgatgtttgcattcaactcacagtgttgaacctttctttgatagttcaggtttgaaacggtctttctgtagaaactgcaagtagatatttggacctctctgaggatttcgttggaaacgggataaactgcacagaactaaaacagaagcattcacagaaaactcttggtgacgactgagtttaactcacagagctgaacattcctttggatggagcagtttcgaaacacactatttgtagaatgtgcaagtggatatttaggcctctctgaggatttcgttggaaacgggataaaccgcacagaactaaacagaagcattctcagaaactactttgtgatgattgcattcaagtcacagagttgaacattccctttgacagagcagtttggaaactctctttgcgtagaatctgcaagtggagatatggaccgctttgaggcctatggtagtaaaggaaatagcttcatataaaagctagacagcagcattctcagaaacttctttgtgatgcttgcattcaactcacagagttgaactttcctttcgagagagaagctttgaaacactctttttccagaatctgcaagtggacatttggagggctttgaggcctgtggtggaaaaggaattatcttcccgtaaaagctagatagaagcattgtcagaaacttctttgtgatgattgcattcaactcacagagatgaaggttcctttacaaacagcagtttccaaacactctttctgtggaatctgcaagtggatatttggacctctttgaagatttcgttggaaacgggagaatcttcacagaaaagctaaacagaagcattctcagaaacttctctgtgatgtttgtgttcaactcccagagtttcacgttgcttttcatagagtagttctgaaacatgcttttcgtagtgtctgcaagtggacatttggagcgctttcaggcctgtggtggaaaacgaattatggtcacataaaaactggagagaagccttctcagaaacttctctgtgatgattgcattcaactcacagagttgaaccctcctatggatagagcagtgttgaaactctctttttgtggaacctgcaagtggatatgtggacctctccgaagatgtctttggaaacgggaatatcttcacataaaaactaaacagaagcattctcagaaacttcttggtgatgtttgcattcaaatcccagagttgaaccttcctttgatagttcaggtttgaaacactctttctgtaggatctgcaagtggctatttggaccactctgtggccttcgttcgaaacgggtatatcttcgcataaaatctagacagaagcattctcagaaaatactttgtgatgattgagtttaactcacagagctgaacattcctttggatggagcaggtttgagacacactttttgtagaatctacaagtggatatttggacctctctgaggatttcgttggaaacgggataactgcacctaactaaacggaagcattctcagaaactcctttgtgatgattgcattcaccttacagagttgaacattcctattgatagagcagtttggaaacactgttgttgtggaatgtgcaagtggagatttggagcgctttgaggcctatggtagtaaagggaatagcttcatagaaaaactagacagatgcattctcaggaactttttggtgatgtttgtattcaactcccagagttgaactttcctttggaaagagcagctatgaaacactctttttctagaatctgcaagtggacgtttggagggctttgtggtttgtggtggaaaaggaaatatcttcacctaaatactagagagaagcattctcagaagcttctctgtgatgactgcattcaactcacggagttgaacactccttttgagagcgcagttttgaaactctctttctgtggcatctgcaaggggacatgtagacctctttgaagatttcgttggaaacggaatcatcttcacataaaaactatacagaagcagtctcagaatcttctttgtgatgtttgcattcaaatcccagagttgaactttcctttcaaagttcacgtttgaaacactctttttgcaggatctacaagtggatatttggaccactctgtgtccttcgttcgaaacgggtataacttcacacgacatctagacagaagctttctcagaaaattctttgggatgattgagtggaactcacagagctgaacattccttgcgatgtagcagtttagaaacacactttctgcagaatctgcaagtgcatatttggacctctctgaggaattcgttggaaacgggataatttcagctgactaaacagaagcattctcagaaccttcttcgtgatgtctgcattcaactcacagtgtggaacctttctttgatagttcaggtttgaaacactctttttgtagaaactgcaaggggataattgcacttctttgaggcctaccgtagtaaaggaaataacttcctatagaaagaagacagaagcattctcagaaccctcttcgtgatgtttgcattcaactcacagtgctgaacctttctttgatagttcagctttgaaacactcttcttgtagaaactgcaagtggatatttggtcctctctgaggatttcgttggaaacgggataaaccgcacagaactaaacagaagcattctcagaaccttcttcgtgatgtttgcattcaactcacagtgttgaacctttctttgatagttcaggtttgaaacggtctttctgtagaaactgcaagtagatatttggacctctctgaggatttcgttggaaacgggataacccgcacagaactaaaacagaagcattcacagaaaactcttggtgacgactgagtttaactcacagagctgaacattcctttggatggagcagtttcgaaacacactatttgtagaatgtgcaagtggatatttaggcctctctgaggatttcgttggaaacgggataaaccgcacagaactaaacagaagcattctcagaaactactttgtgatgattgcattcaagtcacagagttgaacattccctttgacagagcagtttggaaactctctttgtgtagaatctgcaagtggagatatggaccgctttgaggcctatggtagtaaaggaaatagcttcatataaaagctagacagtagcattctcagaaacttctttgtgatgcttgcattcaactcacagagttgaactttcctttcgagagagaagctttgaaacactctttttccagaatctgcaagtggacatttggagggctttgaggcctgtggtggaaaaggaattatcttcccgtaaaagctagacagaagcattgtcagaaacttctttgtgatgattgcattcaactcacagagttgaaggttccttttcaaagagcagtttccaatcactctttctgtggaatctgcaagtggatatttggacctctttgaagatttcgttggaaacgggagaatcttcacagaaaagctaaacagaagcattctcagaaacttctctgtgatgtttgtgttcaactcccagagtttcacattgcttctcatagagtagttctgaaacatgcttttcgtagtgtctgcaagtggacatttggagcgctttcaggcctgtggtggaaaacgaattatggtcacataaaaactggagagaagccttctcagaaacttctctgcgatgattgcattcaactcacagagttgaaccctcctatggatagagcagtgttgaaactctctttttgtggaatctgcaagtggatatgtggacctctttgaagatgtctttggaaacgggaatatcttcacataaaaactaaacggaaggattctcagaaacttcttggtgatgtttgcattcaaatcccagagttgaaccttcctttgatagttcaggtttgaaacactctttttgtaggatctgcaagtggctatttggaccactcctgtggcattcgttcaaaacgggtatatcttcgcataaaatctagacagaagcattctcagaaaatactttgtgatgattgagtttaaatcacagagctgaacattcctttggatggagcaggtttgagacacactttttgtagaatctacaagtggatatttggacctctctgaggatttcgttggaaacgggataactgcacctaactaaacggaagcattctcagaaactgctttgtgatgattgcattcacctcacagagttgtacattcctattgatagagcagtttggaaacactcttgttgtggaatgtgcaagtggacatttggagtgctttgaggcctatggtagtaaagggaatagcttcatagaaaaactagacagatgcattctcaggaactttttggtgatgtttgtattcaactcccagagttgaactttcctttggaaagagcagctatgaaacactctttttctagaatctgcaagtggacgtttggagggctttgtggtttgtggtggaaaaggaaatatcttcacctaaatactagatagaagcattctcagaagcttctctgtgatgactgcattcaactcacggagttgaacactccttttgagagcgcagttttgaaactctctttctgtggcatctgcaaggggacatgtagacctctttgaagatttcgttggaaacggaatcatcttcacataaaaactatacagaagcagtctcagaatcttctttgtgatgtttgcattcaaatcccagagttgaactttcctttcaaagttcacgtttgaaacactctttttgcaggatctacaagtggatatttggaccactctgtgtccttcgttcgaaacgggtatatcttcacacgacatctagacagaagctttctcagaaaattctttgggatgattgagtggaactcacagagctgaacattccttgcgatgtagcagtttagaaacacactttctgcagaatctgcaagtgcatatttggacctctctgaggaattcgttggaaacgggataatttcagctgactaaacagaagcattctcagaaccttcttcgtgatgtctgcattcaactcacagtgtggaacctttctttgatagttcaggtttgaaacactctttttggagaaactgcaaggggatcattgcacttctttgtggcctaccgtagtaaaggagataagttcctataaaaagaagacagaagcattctcagaacactcttcgtgatgtttgcattcaactcacggtgctgaacctttctttgatagttcagctttgaaacactctttttgtagaaactgcaagtggatatttggtcctctctgaggatttcgttggaaacgggataaaccgcacagaactaaacagaagcattctcagaaccttcttcgtgatgtttgcattcaactcacagtgttgaacctttctttgatagttcaggtttgaaacggtctttctgtagaaactgcaagtagatatttggacctctctgaggatttcgttggaaacgggataacccgcacagaactaaaacagaagcattcacagaaaactcttggtgacgactgagtttaactcacagagctgaacattcctttggatggagcagtttcgaaacacactatttgtagaatctgcaagtggatatttgggcctctctgaggatttcgttggaaacgggataaaccgcacagaactaaaacagaagcattctcagaaactactttgtgatgattgcattcaagtcacagagttgaacattccctttgacagagcagtttggaaactctctttgtgtagaatctgcaagtggagatatggaccgctttgaggcctatggtagtaaaggaaataccttcatataaaagctagacagtagcattctcagaaacttctttgtgatgcttgcattcaactcacagagttgaactttcctttcgagagagaagctttgaaacactctttttccagaatctgcaagtggacatttggagggctttgaggcctgtgttggaaaaggaattatcttcccgtaaaagctagacagaagcattgtcagaaacttctttgtgatgattgcattcaactcacagagttgaaggttccttttcaaacagcagtttccaatcactctttctgtggaatctgcaagtggatatttcgtcctctttgaagatttcgttggaaacgggagaaccttcacagaaaagctaaacagaagcattctcagaaacttctctgtgatgtttgtgttcaactcccagagtttcacattgcttttcatagagtagttctgaaacatgcttttcgtagtgtctacaagtggacatttggagcgctttcaggcctgtggtggaaaatgaattatggtcacataaaaactggagagaagccttctcagaaacttctctgtgatgattgcattcaactcacagagttgaaccctcctatggatagagcagtgttgaaactctctttttgtggaatctgcaagtggatatgtggacctctccgaagatgtctttggaaacgggaatatcttcacataaaaactaaacagaagcattctcagaaacttcttggtgatgtttgcattcaaatcccagagttgaaccttcctttgagagttcaggtttgaaacactctttttgtaggatctgcaagtggatatttggaccactctgtggccttcgttcgaaacgggtacatcttcgcataaaatctagacagaagcattctcagaaaatactttgtgatgattgagtttaactcacagagctgaacattcctttggatggagcaggtttgagacacactttttgtagaaactacaagtggatatttggacctctctgaggatttcgttggaaacgcgataactgcacctaattaaacggaagcattctcagaaactgctttgtgatgattgcattcacctcacagagttgaacattcctattgatagagcagtttggaaacactcttgttgtggaatgtgcaagtggagatttggagcgctttgaggcctatggtagtaaagggaatagcttcatagaaaaactagacagatgcattctcaggaactttttggtgatgtttgtattcaactcccagagttgaactttcctttggaaagagcagctatgaaacactctttttctagaatctgcaagtggacgtttggagggctttgtggtttgtggtggaaaaggaaatatcttcacctaaatactagatagaagcattctcagaagcttctctgtgatgactgcattcaactcacggagttgaacactccttttgagagcgcagttttgaaactctctttctgtggcatctgcaaggggacatgtagacctctttgaagatttcgttggaaacggaatcatcttcacataaaaactatacagaagcagtctcagaatcttctttgtgatgtttgcattcaaatcccagagttgaactttcctttcaaagttcacgtttgaaacactctttttgcaggatctacaagtggatatttggaccactctgtgtccttcgttcgaaacgggtatatcttcacacgacatctagacagaagctttctcagaaaattctttgggatgattgagtggaactcacagagctgaacattccttgcgatgtagcagtttagaaacacactttctgcagaatctgcaagtgcatatttggacctctctgaggaattcgttggaaacgggataatttcagctgactaaacagaagcattctcagaaccttcttcgtgatgtctgcattcaactcacagtgtggaacctttctttgatagttcaggtttgaaacactctttttgtagaaactgcaaggggataattgcacttctttgaggcctaccgtagtaaaggaaataacttcctatagaaagaagacagaagcattctcagaaccctcttcgtgatgtttgcattcaacacacagtgctgaacctttctttgatagttcagctttgaaacactctttttgtagaaactgcaagtggatatttggtcctctctgaggatttcgttggaaacgggataaactgcacagaactaaacagaagcattctcagaaccttcttcgtgatgtttgcattcaactcacagtgttgaacctttctttgatagttcaggtttgaaacggtctttctgcagaaactgcaagtagatatttggaccgctctgaggatttcgttggaaacgggataacccgcacagaactaaaacagaagcattcacagaaaactcttggtgacgactgagtttaactcacagagctgaacattcctttggatggagcagtttcgaaacacactatttgtagaatgtgcaagtggatatgtgggcctctctgaggatttcgttggaaacgggataaaccgcacagaactaaacagaagcattctcagaaactactttgtgatgattgcattcaagtcacagagttgaacattccctttgacagagcagtttggaaactctctttgtgtagaatctgcaagtggagatatggaccgctttgaggcctatggtagtaaaggaaatagcttcatataaaagctagacagtagcattctcagaaacttctttgtgatgcttgcattcaactcacagagttgaactttcctttcgagagagaagctttgaaacactctttttccagaatgtgcaagtggacatttggggagctttgaggcctgtggtggaaaaggaattatcttcccgtaaaagctagatagaagcattgtcagaaacttctttgtgatgattgcattcaactcacagagttgaaggttccttttcaaacagcagtttccaatcactctttctgtggaatctgcaagtggatatttgggcctctctgaggatttcgttggaaacgggataaaacgcacagaactaaaacagaagcattctcagaaacttctctgtgatgtttgtgttcaactcccagagtgtcacattgcttctcatagagtagttctgaaacatgcttttcgtagtgtctgcaagtggacatttggagcgctttcaggcctgtggtggaaaacgaattatggtcacataaaaactggacagaagccttctcagaaacttctctgtgatgattgcattcaactcacagagttgaaccctcctatggatagagcagtgttgaaactctctttttgtggaatctgcaagtggatatgtggacctctccgaagatgtctttggaaacgggaatatcttcacataaaaactaaacagaagcattctcagaaacttcttggtgatgtttgcattcaaatcccagagttgaaccttcctttgatagttcaggtttgaaacactctttttgtaggatctgcaagtggatatttggaccactctgtggccttcgttcgaaacgggtacatcttcacataaaatctatacagaagcattctcagaaaatactttgtgatgattgagtttaactcacagagctgaacattcctttggatggagcaggtttgagacacactttttgtagaatctacaagtggatatttggacctctctgaggatttcgttggaaacgggataactgcacctaactaaacgggaagcattctcagaaactgctttgtgatgattgcattcacctcacagagttgaacattcctattgatagagcagtttggaaacactcttgttgtggaatgtgcaagtggagatttggagcgctttgaggcctatggtagtaaagggaatagcttcatagaaaaactagacagatgcattctcaggaactttttggtgatgtttgtattcaactcccagagttgaactttcctttggaaagagcagctatgaaacactctttttctagaatctgcaagtggacgtttggagggctttgtggtttgtggtggaaaaggaaatatcttcacctaaatactagatagaagcattctcagaagcttctctgtgatgactgcattcaactcacggagttgaacactccttttgagagcgcagttttgaaactctctttctgtggcatctgcaaggggacatgtagacctctttgaagatttcgttggaaacggaatcatcttcacataaaaactatacagaagcagtctcagaatcttctttgtgatgtttgcattcaaatcccagagttgaactttcctttcaaagttcacgtttgaaacactctttttgcaggatctacaagtggatatttggaccactctgtgtccttcgttcgaaacgggtatatcttcacacgacatctagacagaagctttctcagaaaattctttgggatgattgagttgaactcacagagctgagcattccttgcgatgtagcagtttagaaacacactttctgcagaatctgcaagtgcatatttggacctctgtgaggaattcgttggaaacgggataatttcagctgactaaacagaagcattctcagaaccttcttcgtgatgtctgcattcaacacaaagtgtggaacctttctttgatagttcaggttttaaaaactctttttgtagaaactgcaaggggataattgcactctttgaggagtaccgtagtaaaggaaataacttcctataaaaagaagacagaagcattctcagaaccctcttcgtgatgtttgcattcaactcacagtgctgaacctttctttgatagttcagctttgaaacactctttttgtagaaactgcaagtgaatatttggtcctctctgacgatttcgttggaaacgggataaaacgcacagaactaaacagaagcattctcagaaccttcttcgtgatgtttgcattcaactcacagtgttgaacctttctttgatagttcaggtttgaaacggtctttctgtagaaactgcaagtagatatttggacctctctgaggatttcgttggaaacgggataaaccgcacagaactaaaacagaagcattcacagaaaactcttggtgacgactgagtttaactcacagagctgaacattcctttggatggagcagtttcgaaacacactatttgtagaatgtgcaagtggatatttaggcctctctgaggatttcgttggaaacgggataaaccgcacagaactaaacagaagcattctcagaaactactttgtgatgattgcattcaagtcacagagttgaacattccctttgacagagcagtttggaaactctctttgtgtagaatctgcaagtggagatatggaccgctttgaggcctatggtagtaaaggaaatagcttcatataaaagctagacagtagcattctcagaaacttctttgtgatgcttgcattcaactcacagagttgaactttcctttcgagagagaagctttgaaacactctttttccagaatgtgcaagtggacatttggggagctttgaggcctgtggtggaaaaggaattatcttcccgtaaaagctagatagaagcattgtcagaaacttctttgtgatgattgcattcaactcacagagttgaaggttccttttcaaagagcagtttccaatcactctttctgaggaatctgcaagtggatatttggacctattttgaagatttcgttggaaacgggataatcttcacagaaaagctaaacagaagcattctcagaaacttctctgtgatgtttgtgttcaactcccagagtttcacattgcttttcatagagtagttctgaaacatgcttttcgtagtgtctgcaagtggacatttggagcgctctcaggcctgtggtggaaaacgaattatggtcacataaaaactggagagaagccttctcagaaacttctctgtgatgattgcattcaactcacagagttgaaccctcctatggatagagcagtgttgaaactctctttttgtggaatctgcaagtggatatgtggacctctccgaagatgtctttggaaacgggaatatcttcacataaaaactaaacagaagcattctcagaaacttcttggtgatgtttgcattcaaatcccagagttgaaccttcctttgatagttcaggtttgaaacactctttttgtaggatctgcaagtggctatttggaccactctgtggccttcgttcgaaacgggtatatcttcgcataaaatctagacagaagcattctcagaaaatactttgtgatgattgagtttaaatcacagagctgaccattcctttggatggagcaggtttgagacacactttttgtagaatctacaagtgaatatttggacctctctgaggatttcgttggaaacgggataactgcacctaactaaacggaagcattctcagaaactgctttgtgatgattgcattcacctcacagagttgaacattcctattgatagagcagtttggaaacactcttgttgtggaatgtgcaagtggagatttggagcgctttgaggcctatggtagtaaagggaatagcttcatagaaaaactagacagatgcattctcaggaactttttggtgatgtttgtattcaactcccagagttgaactttcctttggaaagagcagctatgaaacactctttttctagaatctgcaagtggacgtttggagggctttgtggtttgtggtggaaaaggaaatatcttcacctaaatactagatagaagcattctcagaagcttctctgtgatgactgcattcaactcacggagttgaacactccttttgagagcgcagttttgaaactctctttctgtggcatctgcaaggggacatgtagacctctttgaagatttcgttggaaacggaatcatcttcacataaaaactatacagaagcagtctcagaatcttctttgcgatgtttgcattcaaatcccagagttgaactttcctttcaaagttcacgtttgaaacactctttttgcaggatctacaagtggatatttggaccactctgtgtccttcgttcgaaacgggtatatcttcacacgacatctagacagaagctttctcagaaaattctttgggatgattgagttgaactcacagagataaacattccttgcgatgtagcagtttagaaacacactttctgcagaatctgcaagtgcatatttggacctctctgaggaattcgttggaaacgggataatttcagctgactaaacagaagcattctcagaaccttcttcgtgatgtctgcattcaactcacagtgtggaacctttctttgatagttcaggtttgaaacactctttttgtagaaactgcaaggggataattgcacttctttgaggcctaccgtagtaaaggaaataacttcctatagaaagaagacagaagcattctcagaaccctcttcgtgatgtttgcattcaactcacggtgctgaacctttctttgatagttcagctttgaaacactctttttgtagaaaccgcaagtgtatatttggtcctctctgaggatttcgttggaaacgggataaaccgcacagaactaaacagaagcattctcagaaccttcttcgtgatgtttgcattcaactcacagtgttgaacctttctttgatagttcaggtttgaaacggtctttctgtagaaactgcaagtagatatttggacctctctgaggatttcgttggaaacgggataaaccgcacagaactaaaacagaagcattcacagaaaactcttggtgacgactgagtttaactcacagagctgaacattcctttggatggagcagtttcgaaacacactattggtagaatctgcaagtggatatttgggcctctctgaggatttcgttggaaacgggataaaccgcacagaactaaaacagaagcattctcagaaactactttgtgatgattgcattcaagtcacagagttgaacattccctttgacagagcagtttggaaactctctttgtgtagaatctgcaagtggagatatggaccgctttgaggcctatggtagtaaaggaaatagcttcatataaaagctagacagtagcattctcagaaacttctttgtgatgcttgcattcaactcacagagttgaactttcctttcgagagagaagctttgaaacactctttttccagaatgtgcaagtggacatttggggagctttgaggcctggggtggaaaaggaattatcttcccgtaaaagctagatagaagcattgtcagaaacttctttgtgatgattgcattcaactcacagagttgaaggttccttttcaaacagcagtttccaatcactctttctgtggaatctgcaagtggatatttgggcctctctgaggatttcgttggaaacgggataaaacgcacagaactaaaacagaagcattctcagaaacttctctgtgatgtttgtgttcaactcccagagtttcacgttgcttttcatagagtagttctgaaacatgcttttcgtagtgtctgcaagtggacatttggagcgctttcaggcctgtggtggaaaacgaattatggtcacataaaaactggagagaagccttctcagaaacttctctgtgatgattgcattcaactcacagagttgaaccctactatggatagagcagtgttgaaactctctttttgtggaatctgcaagtggatatgtggacctctccgaagatgtctttggaaaggggactatcttcacataaaaactaaacagaagcattctcagaaacttcttggtgatgtttgcattcaaatcccagagttgaaccttcctttgatagttcaggtttgaaacactctttttgtaggatctgcaagtggatatttggaccactctgtggcccttcgttcgaaacgggtacatcttcgcataatatctagacagaagcattctcagaaaatactttgtgatgattgagtttaaatcacagagctgaccattcctttggatggagcaggtttgagacacactttttgtagaatctacaagtggatatttggacctctctgaggatttcgttggaaacgggataactgcacctaactaaacggaagcattctcagaaactgctttgtgatgattgcattcacctcacagagttgaacattcctattgatagagcagtttggaaacactcttgttgtggaatgtgcaagtggagatttggagcgctttgaggcctatggtagtaaagggaatagcttcatagaaaaactagacagatgcattctcaggaactttttggtgatgtttgtattcaactcccagagttgaactttcctttggaaagagcagctgtgaaacactctttttctagaatctgcaagaggacgtttggagggctttgtggtttgtggtggaaaaggaaatatcttcacctaaatactagatagaagcattctcagaagcttctctgtgatgactgcattcaactcaaggagttgaacactccttttgagagcgcagttttgaaactctctttctgtggcatctgcaaggggacatgtagacctctttgaagatttcgttggaaacggaatcatcttcacataaaaactatacagaagcagtctcagaatcttctttgtgatgtttgcattcaaatcccagagttgaactttcctttcaaagttcacgtttgaaacactctttttgcaggatctacaagtggatatttggaccactctgtgtccttctttcgaaacgggtatatcttcacatgacatctagacagaagctttctcagaaaattctttgggatgattgagttgaactcacagatctgagcattccttgcgatgtagcagtatagaaacacactttctgcagaatctgcaagtgcatatttggacctctctgaggaattcgttggaaacgggataatttcagctaactcgttggaaacgggataatttcagctaactaaacagaagcattctcagtaaccttcttcgtgatgtctgcattcaactcacagtgtggaacctttctttgatagttcaggtttgaaacactctttttgtagaaactgcaaggggataattgcacttctttgaggcctaccgtagtaaaggaaataacttcctataaaaagaagacagaagaattctcagagccctcttcgtgatgtttgcattcaactcacagtgctgaacctttctttgatagtgcagctttgaaacactctttttgtagaaactgcaagtggatgtttggtcctctctgaggatttcgttggaaacgggataaaccgcacagaactaaaacagaagcattctcagaaccctcttcgtgatgtttgcattcaacacacagtgctgaacctttctttgatagttcagctttgaaacactctttttgtagaaactgcaactggatatttggtcctctctgaggatttcgttggaaacgggataaaccacacagaactaaacagaagcattcacagaaaactcttggtgacgactgagtttaactcacagagctgaacattcctttggatggagcagtttcgaaacacactatttgtagaatctgcaattggatatgccatggccactctgaagatttcgttggaaacgggataaaccgcacagaactaaaacagaagcattctcagaaactactttgtgatgattgcattcaagccacagagctgaacattccctttgacggagcagtttggaaactctctttgtgtagaatctgcaagtggagatatggtatgctttgaggactatggtagtaaaggaaatagcttcatataaaagctagacagtagcattctcagaaacttctttgtgatgcttgcattcaactcacagagttgaactttccattcgagagagaagctttgaaacactctttttccagaatctgcaagtggacatttggagggctttgaggcctgtggtggaaaaggaattatcttcccgtaaaagctagatagaagcattgtcagaaacttctttgtgatgattgcattcaactcacagagttgaaggttcctttccaaacagcagtttccaaacactctttctgtggaatctgcaagtggatatttggacctctttgaagatttcgttggaaacgggagaatcttcacagaaaagctaaacagaagcattctcagaaacttctctgtgatgtttgtgttcaactcccagagtttcacgttgcttttcatagagtagttctgaaacatgcttttcgtagtgtctgcaagtggacatttggagcgctttcaggcctgtggtggaaaacgaattatggtcacataaaaactggagagaagccttctcagaaacttctctgtgatgattgcattcaactcacagagttgaaccctcctatggatagagcagtgttgaaactctctttttgtggaatctgcaagtggatatgtggacctctccgaagatgtctttggaaacgggaatatcttcacataaaaactaaacagaagcattctcagaaacttcttggtgatgtttgcattcaaatcccagagttgaaccttcctttgatagttcaggtttgaaacactctttctgtaggatctgcaagtggctatttggaccactctgtggccttcgttcgaaacgggtatatcttcgcataaaatctagacagaagcattctcagaaaatactttgtgatgattgagtttaaatcacagagctgaccattcctttggatggagcaggtttgagacacactttttgtagaatctacaagtggatatttggacctctctgaggatttcgttggaaacgggataactgcacctaactaaacggaagcattctcagaaactgctttgtgatgattgcattcacctcacagagttgaacattcctattgatagagcagtttggaaacactcttgttgtggaatgtgcaagtggagatttggagcgctttgaggcctgtggtagtaaagggaatagcttcatagaaaaactagacagatgcattctcaggaactttttggtgatgtttgtattcaactcccagagttcaactttcctttggaaagagcagctatgaaacactctttttctagaatctgcaagtggacgtttggagggctttgcggtttgtggtggaaaaggaaatatcttcacctaaatactagatagaagcatcctcagaagcttctctgtgatgactgcattcaactcacggagttgaacactccttttgagagcgcagttttgaaactctctttctgtggcatctgcaaggggacatgtagacctctttgaagatttcgttggaaacggaatcatcttcacataaaaactacacagaagcagtctcagaatcttctttgtgatgtttgcattcaaatcccagagttgaactttcctttcaaagttcacgtttgaaacactctttttgcaggatctacaagtggatatttggaccactctgtgtccttcgttcgaaacgggtatatcttcacacgacatctagacagaagctttctcagaaaattctttgggatgattgagtggaactcacagagctgaacattccttgcgatgtagcagtttagaaacacactttctgcagaatctgcaagtgcatatttggacctctgtgaggaattcgttggaaacgggataatttcagctgactaaacagaagcattctcagaaccttcttcgtgatgtctgcattcaactcacagtgtggaacctttctttgatagttcaggtttgaaacactctttttgtagaaactgcaaggggatcattgcacttctttgaggcctaccgtagtaaaggagataacttcctataaaaagaagacagaagcattctcagaaccctcttcgtgatgtttgcattcaactcacagtgctgaacctttctttgatagttcagctttgaaacactctttttgtagaaactgcaagtggatatttggtcctctctgaggatttcgttggaaacgggataaactgcacagaactaaacagaagcattctcagaaccttcttcgtgatgtttgcattcaactcacagtgttgaacctttctttgatagttcaggtttgaaacggtctttctgtagaaactgcaagtagatatttggacctctctgaggatttcgttggaaacgggataacccgcacagaactaaaacagaagcattcacagaaaactcttggtgacgactgagtttaactcacagagctgaacattcctttggatggagcagtttcgaaacacactatttgtagaatgtgcaagtggatatttgggcctctctgaggatttcgttggaaacgggataaaccgcacagaactaaacagaagcattctcagaaactactttgtgatgattgcattcaagtcacagagttgaacattccctttgacagagcagtttggaaactctctttgtgtagaatctgcaagtggagatatggaccgctttgaggcctatggtagtaaaggaaatagcttcatataaaagctagacagtagcattctcagaaacttctttgtgatgcttgcattcaactcacagagttgaactttcctttcgagagagaagctttgaaacactctttttccagaatctgcaagtggacatttggagggctttgaggcctgtggtggaaaaggaattatcttcccgtaaaagctagatggaagcattgtcagaaacttctttgtgatgattgcattcaactcacagagatgaaggttcctttacaaacagcagtttccaaacactctttctgtggaatctgcaagtggatatttggacctctttgaagatttcgttggaaacgggagaatcttcacagaaaagctaaacagaagcattctgagaaacttctctgtgatgtttgtgttcaactcccagagtttcacgttgcttttcatagagtagttctgaaacatgcttttcgtagtgtctgcaagtggacatttggagcgctttcaggcctgtggtggaaaacgaattatggtcacataaaaactggagagaagccttctcagaaacttctctgtgatgattgcattcaactcacagagttgaaccctcctatggatagagcagtgttgaaactctctttttgtggaatctgcaagtggatatgtggacctctccgaagatgtctttggaaacgggaatatcttcacataaaaactaaacagaagcattctcagaaacttcttggtgatgtttgcattcaaatcccagagttgaaccttcctttgatagttcaggtttgaaacactctttctgtaggatctgcaagtggctatttggaccactctgtggccttcgttcgaaacgggtatatcttcgcataaaatctagacagaagcattctcagaaaatactttgtgatgattgagtttaaatcacagagctgaccattcctttggatggagcaggtttgagacacactttttgtagaatctacaagtggatatttggacctctctgaggatttcgttggaaacgggataactgcacctaactaaacggaagcattctcaggaaactgctttgtgatgattgcattcacctcacagtagttgaacattcctattgatagagcagtttggaaacactcttgttgtggaatgtgcaagtggagatttggagcgctttgaggcctgtggtagtaaagggaatagcttcatagaaaaactagacagatgcattctcaggaactttttggtgatgtttgtattcaactcccagagttgaactttcctttggaaagagcagctatgaaacactctttttctagaatctgcaagtggacgtttggagggctttgtggtttgtggtggaaaggaaatatcttcacctaaatactagatagaagcattctcagaagcttctctgtgatgactgcattcaactcacggagttgaacactccttttgagagcgcagttttgaaactctctttctgtggcatctgcaaggggacatgtagacctctttgaagatttcgttggaaacggaatcatcttcacataaaaactatacagaagcagtctcagaatcttctttgtgatgtttgcattcaaatcccagagttgaactttcctttcaaagttcacgcttgaaacactctttttgcaggatctacaagtggatatttggaccactctgtgtccttcgttcgaaacgggtatatcttcacatgacatctagacagaagctttctcagaaaattctttgggatgattgagtggaactcacagagctgaacattccttgcgatgtagcagtttagaaacacactttctgcagaatctgcaagtgcatatttggacctctctgaggaattcgttggaaacgggataatttcagctgactaaacagaagcattctcagaaccttcttcgtgatgtctgcattcaactcacagtgtggaacctttctttgatagttcaggtttgaaacactctttttgtagaaactgcaaggggataattgcacttctttgaggcctaccgtagtaaaggaaataacttcctatagaaagaagacagaagaattctcagagccctcttcgtgatgtttgcattcaactcacagtgctgaacctttctttgatagtgcagctttgaaacactctttttgtagaaactgcaagtggatgtttggtcctctctgaggatttcgttggaaacgggataaaccgcacagaactaaaacagaagcattctcagaaccttcttcatgatgtttgcattcaactcacagtgttgaacctttctttgatagttcaggtttgaaacggtctttctgtagaaactgcaagtagacatttggacctctctgaggatttcgttggaaacgggataactgcacctaactaaacggaagcattcacagaaaactcttggtgacgactgagtttaactcacagagctgaacattcctttggatggagcagtttcgaaacacactatttgtagaatgtgcaagtggatatttaggcctctctgaggatttcgttggaaacgggataaaccgcacagaactaaacagaagcattctcagaaactactttgtgatgattgcattcaagtcacagagttgaacattccctttgacagagcagtttggaaactctctttgtgtagaatctgcaagtggagatatggaccgctttgaggcctatggtagtaaaggaaatagcttcatataaaagctagacagtagcattctcagaaacttctttgtgatgcttgcattcaactcacagagttgaactttcctttcgagagagaagctttgaaacactctttttccagaatgtgcaagtggacatttggggagctttgaggcctgtggtggaaaaggaattatcttcccgtaaaagctagatagaagcattgtcagaaacttctttgtgatgattgcattcaactcacagagttgaaggttccttttcaaacagcagtttccaatcactctttctgtggaatctgcaagtggatatttgggcctctctgaggatttcgttggaaacgggataaaacgcacagaactaaaacagaagcattctcagaaacttctctgtgatgtttgtgttcaactcccggagtttcacattgcttctcatagagtagttctgaaacatgcttttcgtagtgtctgcaagtggacatttggagcgctttcaggcctgtggtggaaaacgaattatggtcacataaaaactggagagaagccttctcagaaacttctctgtgatgattgcattcaactcacagagttgaaccctcctatggatagagcagtgttgaaactctctttttgtggaatctgcaagcggatatgtggacctctccgaagatgtctttggcaacgggaatatcttcacataaaaactaaacagaagcattctcagaaacttcttggtgatgtttgcattcaaatcccagagttgaaccttcctttcatagttcaggtttgcaacactctttttgtaggatctgcaagtggatatttggaccactctgtggccttcgttcgaaacgggtacatcttcgcataaaatctagacagaagcattctcagaaaatactttgtgatgattgagtttaaatcacagagctgaccattcctttggatggagcaggtttgagacacactttttgtagaatctacaagtggatatttggacctctctgaggatttcgttggaaacgggataactgcacctaactaaacggaagcattctcagaaactgctttgtgatgattgcattcacctcacagagttgaacattcctattgatagagcagtttggaaacactcttgttgtggaatgtgcaagtggagatttggagcgctttgaggcctatggtagtaaagggaatagcttcatagaaaaactagacagatgcattctcaggaactttttggtgatgtttgtattcaactcccagagttgaactttcctttggaaagagcagctatgaaacactctttttctagaatctgcaagtggacgtttggagggctttgtggtttgtggtggaaaaggaaatatcttcacctaaatactagatagaagcatcctcagaagcttctctgtgatgactgcattcaactcacggagttgaacactccttttgagagcgcagttttgaaactctctttctgtggcatctgcaaggggacatgtagacctctttgaagatttcgttggaaacggaatcatcttcacataaaaactatacagaagcagtctcagaatcttctttgtgatgtttgcattcaaatccccgagttgaactttcctttcaaagttcacgtttgaaacactctttttgcaggatctacaagtggatatttggaccactctgtgtccttcgttcgaaacgggtatatcttcacatgacatctagacagaagctttctcagaaaattctttgggatgattgagttgaactcacagaggtgagcattccttgcgatgtagcagtttagaaacacactttctgcagaatctgcaagtgcatatttggacctctgtgaggaattcgttggaaacgggataatttcagctgactaaacagaagcattctcagaaccttcttcgtgatgtctgcattcaactcacagtgtggaacctttctttgatagttcaggtttgaaacactctttttgtagaaactgcaaggggataattgcacttctttgaggcctaccgtagtaaaggaaataacttcctatagaaagaagacagaagcattctcagaaccctcttcgtgatgtttgcattcaactcacagtgctgaacctttctttgatagttcagctttgaaacactcttcttgtagaaactgcaagtggatatttggtcctctctgaggatttcgttggaaacgggataaaccgcacagaactaaacagaagcattctcagaaccttcttcgtgatgtttgcattcaactcacagtgttgaacctttctttgatagttcaggtttgaaacggtctttctgtagaaactgcaagtagatatttggacctctctgaggatttcgttggaaacgggataacccgcacagaactaaaacagaagcattcacagaaaactcttggtgacgactgagtttaactcacagagctgaacattcctttggatggagcagtttcgaaacacactatttgtagaatgtgcaagtggatatttgggcctctctgaggatttcgttggaaacgggataaaccgcacagaactaaacagaagcattctcagaaactactttgtgatgattgcattcaagtcacagacttgaacattccctttgacagagcagtttggaaactctctttgtgtagaatctgcaagtggagatatggaccgctttgaggcctatggtagtaaaggaaatagcttcatataaaagctagacagtagcattctcagaaacttctttgtgatgcttgcattcaactcacagagttgaactttcctttcgagagagaagctttgaaaaactcttttccagaatctgcaagtggacatttggagggcattgaggcctgtggtggaaaaggaattatcttcccgtaaaagctagacagaagcattgtcagaaacttctttgtgatgattgcattcaactcacagagttgaaggttccttttcaaacagcagtttccaatcactctttctgtggaatctgcaagtggatatttgggcctctctgaggatttcgttggaaacgggataaaacgcacagaactaaaacagaagcattctcagaaacttctctgtgatatttgtgttcaactcccagagtttcacattgcttctcatagagtagttctgaaacatgcttttcatagtgtctgcaagtggacatttggagcgctttcaggcctgtggtggaaaacgaattatggtcacataaaaactggagagaagccttctcagaaacttctctgtgatgattgcattcaactcacagagttgaaccctcctatggatagagcagtgttgaaactctctttttgtggaatctgcaagtggatatgtggacctctccgaagatgtctttggaaacgggaatatcttcacataaaaactaaacagaagcattctcagaaacttcttggtgatgtttgcattcaaatcccagagttgaaccttcctttgatagttcaggtttgaaacactctttttgtaggatctgcaagtggctatttggaccactctgtggccttcgttcgaaacgggtatatcttcgcataaaatctagacagaagcattctcagaaaatactttgtgatgattgagtttaactcacagagctgaacattcctttggatggagcaggtttgagacacactttttgtagaatctacaagtggatatttggacctctctgaggatttcgttggaaacgcgataactgcacctaactaaacggaagcattctcagaaactgctttgtgatgattgcattcacctcacagagttgaacattcctattgatagagcagtttggaaacactcttgttgtggaatgtgcaagtggagatttggagcgctttgaggcctatggtagtaaagggaatagcttcatagaaaaactagacagatgcattctcaggaaccttttggtgatgtttgtattcaactcccagagttgaactttcctttggaaagagcagctatgaaacactctttttctagaatctgcaagtggacgtttggagggctttgtggtttgtggtggaaaaggaaatatcttcacctaaatactagatagaagcattctcagaagcttctctgtgatgactgcattcaactcacggagttgaacactccttttgagagcgcagttttgaaactctctttctgtggcatctgcaaggggacatgtagacctctttgaagatttcgttggaaacggaatcatcttcacataaaaactatacagaagcagtctcagaatcttctttgtgatgtttgcattcaaatcccagagttgaactttcctttcaaagttcacgtttgaaacactctttttgcaggatctacaagtggatatttggaccactctgtgtccttcgttcgaaacgggtatatcttcacatgacatctagacagaagctttctcagaaaattctttggcatgattgagttgaactcacagagctgaacattccttgcgatggagcagtttagaaacacactttctgcagaatctgcaagtgcatatttggacctctctgaggaattcgttggaaacgcgataatttcagctgactaaacagaagcattctcagaaccttcttcgtgatgtctgtattcaactcacagtgtggaacctttctttgatagttcaggtttgaaacactcctttcgtagaaactgcaaggggataattgcacttctttgaggcctactgtagtaaaggaaataacttcctataaaaagaagacagaagaattctcagaaccctcttcgtgatgtttgcattccacacacagtgctgaaactttctttgatagttcagctttgaaacactctttttgtagaaactgcaagtggatatttggtcctctctgaggatttcgttggaaacgtgataaaccgcacagaactaaacagaagcattcacagaaaactcttggtgacgactgagtttaactcacagagctgaacattcctttggatggagcagtttcgaaacacactctttgtagaatctgcaagtggatatttgggcctctctgaggatttcgttggaaatgggataaaccgcacagaactaaaacagaagcattctcagaaactactttgtgatgattgcattcaagtcacagagttgaacattccctttgacagagcagtttggaaactctctttgtgtagaatctgcaagtggagatatggaccgctttgaggactatggtagtaaaggaaatagcttcatataaaagctaaacagtagcattctcagaaacttctttgtgatgcttgcattcaactcacagagttgaactttcctttcgagagagaagctttgaaacactctttttccagaatctgcaagtggacatttggagggctttgaggcctgtggtggaaaaggaattatcttcccgtaaaagctagatagaagcattgtcagaaacttctttgtgatgattgcattcaactcacagagttgaaggttccttttcaaacagcagtttccaatcactctttctgtggaatctgcaagtggatatttgggcctctctgaggatttcgttggaaacgggataaaacgcacagaactaaaacagaagcattctcagaaacttctctgtgatgtttgtgttcaactcccagagtttcactttgcttttcatagagtagttctgaaacatgcttttcgtagtgtctgcaagtggacatttggagcgctttcaggcctgtggtggaaaacgaattatggtcacataaaaactggagagaagccttctcggaaacttctctgcgatgattgcattcaactcacagagttgaaccctcctatggatagagcagtgttgaaactctctttttgtggaatctgcaagtggatatgtggacctctccgaagatgtctttggaaacgggaatatcttcacatagaaactaaacagaagcattctcagaaacttcttggtgatgtttgcattcaaatcccagagttgaaccttcctttgatagttcaggtttgaaacactctttttgtaggatctgcaagtggatatttggaccactctgtggccttcgttcgaaacgggtacatcttcgcataaaatctagacagaagcattctcagaaaatactttgtgatgattgagtttaactcacagagctgaacattcctttggatggagcaggtttgagacacactttttgtagaatctacaagtggatatttggacctctctgaggatttcgttggaaacgggataactgcacctaactaaacggaagcattctcagaaactgctttgtgatgattgcattcacctcacagagttgaacattcctattgatagagcagtttggaaacactcttgttgtggaatgtgcaagtggagatttggagcgctttgaggcctatggtagtaaagggaatagcttcatagaaaaactagacagatgcattctcaggaaccttttggtgatgtttgtattcaactcccagagttgaactttcctttggaaagagcagctatgaaacactctttttctagaatctgcaagtggacgtttggagggctttgtggtttgtggtggaaaaggaaatatcttcacctaaatactagatagaagcattctcagaagcttctctgtgatgactgcattcaactcacggagttgaacactccttttgagagcgcagttttgaaactctctttctgtggcatctgcaaggggacatgtagacctctttgaagatttcgttggaaacggaatcatcttcacataaaaactatacagaagcagtctcagaatcttctttgtgatgtttgcattcaaatcccagagttgaactttcctttcaaagttcacgtttgaaacactctttttgcaggatctacaagtggatatttggaccactctgtgtccttcgttcgaaacgggtatatcttcacacgacatctagacagaagctttctcagaaaattctttgggatgattgagtggaactcacagagctgaacattccttgcgatgtagcagtttagaaacacactttctgcagaatctgcaagtgcatatttggacctctctgaggaattcgttggaaacgggataatttcagctgactaaacagaagcattctcagaaccttcttcgtgatgtctgcattcaactcacagtgtggaacctttctttgatagttcaggtttgaaacactctttttgtagaaactgcaaggggataattgcacttctttgaggcctaccgtagtaaaggaaataacttcctatagaaagaagacagaagaattctcagaaccctcttcgtgatgtttgcattcaactcacagtgctgaacctttctttgatagtgcagctttgaaacactctttttgtagaaactgcaagtggatatttggtcctctctgaagatttcgttggaaacgggataaaccgcacagaactaaaacagaagcattctctgaaccttcttcgtgatgtttgcattcaactcacagtgttgaacctttctttgatagttcaggttggaaacggtctttctgtagaaactgcaagtagatatttggacctctctgaggatttcgttggaaacgggataaaccgcacagaactaaaacagaagcattcacagaaaactcttggtgacgactgagtttaactcacagagctgaacattcctttggatggagcagtttcgaaacacactatttgtagaatgtgcaagtggatatgtgggcctctctgaggatttcgttggaaacgggataaaccgcacagaactaaacagaagcattctcagaaactactttgtgatgattgcattcaagtcacagagttgaacattccctttgacagagcagtttggaaactctctttgtgtagaatctgcaagtggagatatggaccgctttgaggcctatggtagtaaaggaaatagcttcatataaaagctagacagtagcattctcagaaacttctttgtgatgcttgcattcaactcacagagttgaactttcctttcgagagagaagctttgaaacactctttttccagaatgtgcaagtggacatttggggagctttgaggcctgtggtggaaaaggaattatcttcccgtaaaagctagatagaagcattgtcagaaacttctttgtgatgattgcattcaactcacagagttgaaggttccttttcaaacagcagtttccaatcactctttctgtggaatctgcaagtggatatttgggcctctctgaggatttcgttggaaacgggataaaacgcacagaactaaaacagaagcattctcagaaacttctctgtgatgtttgtgttcaactcccagagtttcacattgcttttcatagagtagttctgaaacatgcttttcgtagtgtctacaagtggacatttggagcgctttcaggcctgtggtggaaaacgaattatggtcacataaaaactggagagaagccttctcagaaacttctctgtgatgattgcattcaactcacagagttgaaccctcctatggatagagcagtgttgaaactctctttttgtggaatctgcaagtggatatgtggacctctccgaagatgtctttggaaacgggaatatcttcacataaaaactaaacagaagcattctcagaaacttcttggtgatgtttgcattcaaatcccagagttgaaccttcctttgatagttcaggtttgaaacactctttctgtaggatctgcaagtggctatttggaccactctgtggccttcgttcgaaacgggtatatcttcgcataaaatctagacagaagcattctcagaaaatactttgtgatgattgagtttaaatcacagagctgaacattcctttggatggagcaggtttgagacacactttttgtagaatctacaagtggatatttggacctctctgaggatttcgttggaaacgggataactgcacctaactaaacggaagcattctcagaaactgctttgtgatgattgcattcacctcacagagttgaacattcctattgatagaagcagtttggaaacactcttgttgtggaatgtgcaagtggagatttggagcgctttgaggcctatggtagtaaagggaatagcttcatagaaaaactagatagatgcattctcaggaactttttggtgatgtttgtattcaactcccagagttgaactttcctttggaaagagcagctatgaaacactctttttctagaatctgcaagtggacgtttggagggctttgtggtttgtggtggaaaaggaaatatcttcacctaaatactagatagaagcattctcagaagcttctctgtgatgactgcattcaactcacggagttgaacactccttttgagagcgcagttttgaaactctctttctgtggcatccgcaaggggacatgtagacctctttgaagatttcgttggaaacggaatcatcttcacataaaaactatacagaagcagtctcagaatcttctttgtgatgtttgcattcaaatcccagagttgaactttcctttcaaagttcacgtttgaaacactctttttgcaggatctacaagtggatatttggaccactctgtgtccttcgttcgaaacgggtatatcttcacatgacatctagacagaagctttctcagaaaattctttgggatgattgagtggaactcacagagctgaacattccttgcgatgtagcagtttagaaacacactttctgcagaatctgcaagtgcatatttggacctctctgaggaattcgttggaaacgggataatttcagctgactaaacagaagcattctcagaaccttcttcgtgatgtctgcattcaactcacagtgtggaacctttctttgatagttcagatttgaaacactctttttgtagaaactgcaaggggataattgcacttcttttaggcctaccgtagtaaaggaaataacttcctataaaaagaagacagaagaattctcagagccctcttcgtgatgtttgcattcaactcacagtgctgaacctttctttgatagtgcagctttgaaacactctttttgtagaaactgcaagtggatgtttggtcctctctgaggatttcgttggaaacgggataaaccgcacagaactaaaacagaagcattctcagaaccttcttcgtgatgtttgcattcaactcacagtgttgaacctttctttgatagttcaggtttgaaacggtctttctgtagaaactgcaagtagatatttggacctctctgaggatttcgttggaaacgggataacccgcacagaactaaaacagaagcattcacagaaaactcttggtgacgactgagtttaactcacagagctgaacattcctttggatggagcagtttcgaaacacactatttgtagaatgtgcaagtggatatttgggcctctctgaggatttcgttggaaacgggataaaccgcacagaactaaaacagaagcattctcagaaactactttgtgatgattgcattcaagtcacagagttgaacattccctttgacagagcagtttggaaactctctttgtgtagaatctgcaagtggagatatggaccgctttgaggcctatggtagtaaaggaaatagcttcatataaaagctagacagtagcattctcagaaacttctttgtgatgcttgcattcaactcacagagttgaactttcctttcgagagagaagctttgaaacactctttttccagaatctgcaagtggacatttggagggctttgaggcctgtggtggaaaaggaattatcttcccgtaaaagctagatagaagcattgtcagaaacttctttgtgatgattgcattcaactcacagagttgaaggttccttttcaaacagcagtttccaatcactctttctgtggaatctgcaagtggatatttgggcctctctgaggatttcgttggaaacgggataaaacgcacagaactaaaacagaagcattctcagaaacttctctgtgatgtttgtgttcaactcccagagtttcacattgcttctcatagagtagttctgaaacatgcttttcgtagtgtctgcaagtggacatttggagcgctttcaggcctgtggtggaaaacgaattatggtcacataaaaactggagagaagccttctcagaaacttctctgtgatgattgcattcaactcacagagttgaaacctcctatggatagagcagtgttgaaactctctttttgtggaatctgcaagtggatatgtggacctctccgaagatgtctttggaaacgggaatatcttcacataaaaactaaacagaagcattctcagaaacttcttggtgatgtttgcattcaaatcccagagttgaaccttcctttgatagttcaggtttgaaacactctttttgtaggatctgcaagtggatatttggaccactctgtggccttcgttcgaaacgggtatatcttcgcataaaatctagacagaagcattctcagaaaatactttgtgatgattgagtttaaatcacagagctgaccattcctttggatggagcaggtttgagacacactttttgtagaatctacaagtggatatttggacctctctgaggatttcgttggaaacgggataactgcacctaactaaacggaagcattctcagaaactgctttgtgatgattgcattcacctcacagagttgaacattcctattgatagagcagtttggaaacactcttgttgtggaatgtgcaagtggagatttggagtgctttgaggcctatggtagtaaagggaatagcttcatagaaaaactagacagatgcattctcaggaactttttggtgatgtttgtattcaactcccagagttgaactttcctttggaaagagcagctatgaaacactctttttctagaatctgcaagtggacgtttggagggctttgtggtttgtggtggaaaaggaaatatcttcacctaaatactagatagaagcattctcagaagcttctctgtgatgactgcattcaactcacggagttgaacactccttttgagagcgcagttttgaaactctctttctgtggcatctgcaaggggacatgtagacctctttgaagatttcgttggaaacggaatcatcttcacataaaaactatacagaagcagtctcagaatcttctttgtgatgtttgcattcaaatcccagagttgaactttcctttcaaagttcacgtttgaaacactctttttgcaggatctacaagtggatatttggaccactctgtgtccttcgttcgaaacgggtatatcttcacacgacatctagacagaagctttctcagaaaattctttgggatgattgagttgaactcacagagctgagcattccttgcgatgtagcagtttagaaacacactttctgcagaatctgcaagtgcatatttggacctctgtgaggaattcgttggaaacgggataatttcagctgactaaacagaagcattctcagaaccttcttcgtgatgtctgcattcaactcacagtgtggaacctttctttgatagttcaggtttgaaacactctttttgtagaaactgcaaggggataattgcacttctttgaggcctaccgtagtaaaggaaataacttcctatagaaagaagacagaagaattctcagagccctcttcgtgatgtttgcattcaactcacagtgctgaacctttctttgatagtgcagctttgaaacactctttttgtagaaactgcaagtggatgtttggtcctctctgaggatttcgttggaaacgggataaaccgcacagaactaaaacagaagcattctcagaaccttcttcgtgatgtttgcattcaactcacagtgttgaacctttctttgatagttcaggtttgaaacggtctttctgtagaaactgcaagtagatatttggacctctctgaggatttcgttggaaacgggataacccgcacagaactaaaacagaagcattcacagaaaacacttggtgacgactgagtttaactcacagagctgaacattcctttggatggagcagtttcgaaacacactatttgtagaatgtgcaagtggatatgtgggcctctctgaggatttcgttggaaacgggataaaccgcacagaactaaacagaagcattctcagaaactactttgtgatgattgcattcaagtcacagagttgaacattccctttgacagagcagtttggaaactctctttgtgtagaatctgcaagtggagatatggaccgctttgaggcctatggtagtaaaggaaatagcttcatataaaagctagacagtagcattctcagaaacttctttgtgatgcttgcattcaactcacagagttgaactttcctttcgagagagaagctttgaaacactctttttccagaatctgcaagtggacatttggagggctttgaggcctgtggtggaaaaggaattatcttcccgtaaaagctagatagaagcattgtcagaaacttctttgtgatgattgcattcaactcacagagttgaaggttccttttcaaacagcagtttccaatcactctttctgtggaatctgcaagtggatatttgggcctctctgaggatttcgttggaaacgggataaaacgcacagaactaaaacagaagcattctcagaaacttctctgtgatgtttgtgttcaactcccagagtttcacattgctattcatagagtagttctgaaacatgcttttcgtagtgtctgcaagtggacatttggagcgctttcaggcctgtggtggaaaacgaattatggtcacataaaaactggagagaagccttctcagaaacttctctgtgatgattgcattcaactcacagagttgaaccctcctatggatagagcagtgttgaaactctctttttgtggaatctgcaagtggatatgtggacctctccgaagatgtctttggaaacgggaatatcttcacataaaaactaaacagaagcattctcagaaacttcttggtgatgttggcattcaaaccccagagttgaaccttcctttgatagttcaggtttgaaacactctttttgtaggatctgcaagtggatatttggaccactctgtggccttcgttcgaaacgggtacatcttcgcataaaatctagacagaagcattctcagaaaatactttgtgatgattgcgttgaactcacagagctgaacattcctttggatggagcaggtttgagacacactttttgtagaatctacaagtggatatttggacctctctgaggatttcgttggaaaccggataactgcacctaactaaacggaagcattctcagaaactgctttgtgatgattgcattcacctcacagagttgaccattcctattgatagagcagtttggaaacactattgttgtggaatgtgcaagtggagatttggagcgctttgaggcctatggtagtaaagggaatagcttcatagaaaaactagacagatgcattctcaggaactttttggtgatgtttgtattcaactcccagagttgaactttcctttggaaagagcagctatgaaacactctttttctagaatctgcaagtggacgtttggagggctttgtggtttgtggtggaaaaggaaatatcttcacctaaatactagatagaagcatcctcagaagcttctctgtgatgactgcattcaactcacggagttgaacactccttttgagagcgcagttttgaaactctctttctgtggcatctgcaaggggacatgtagacctctttgaagatttcgttggaaacggaatcatcttcacataaaaactatacagaagcagtctcagaatcttctttgtgatgtttgcattcaaatcccagagttgaactttcctttcaaagttcacgtttgaaacactctttttgcaggatctacaagtggatatttggaccactctgtgtccttcgttcgaaacgggtatatcttcacacgacatctagacagaagctttctcagaaaattctttgggatgattgagttgagcaaacagagctgaacactccttgcgatgtagcagtttagaaacacactttctgcagaatctgcaagtgcatatgtggacctctctgaggaattcgttggaaacgggataatttcagctgactaaacagaagcattctcagaaccttcttcgtgatgtctgcattcaactcacagtgtggaacctttctttgatagttcaggtttgaatcactctttttgtagaaactgcaaggggataattgcacttctttgaagcctaccgtagtaaaggaaataacttcctataaaaagaagacagaagaattctcagagccctcttcgtgatgtttgcattcaactcacagtgctgaacctttctttgatagtgcagctttgaaacactctttttgtagaaactgcaagtggatgtttggtcctctctgaggatttcgttggaaacgggataaaccgcacagaactaaaacagaagcattctcagaaccttcttcgtgatgtttgcattcaactcacagtgttgaacctttctttgatagttcaggtttgaaacggtctttctgtagaaactgcaagtagatatttggacctctctgaggatttcgttggaaacgggataacccgcacagaactaaaacagaagcattcacagaaaactcttggtgacgactgagtttaactcacagagctgaacattcctttggatggagcagtttcgaaacacactctttgtagaatgtgcaagtggatatttgggcctctctgaggatttcgttggaaacgggataaaccgcacagaactaaaacagaagcattctcagaaactactttgtgatgattgcattcaagtcacagagttgaacattccctttgacagagcagtttggaaactctctttgtgtagaatctgcaagtggagatatggaccgctttgaggcctatggtagtaaaggaaatagcttcatataaaagctagacagtagcattctcagaaacttctttgtgatgcttgcattcaactcacagagttgaactttcctttcgagagagaagctttgaaacactctttttccggaatctgcaagtggacatttggagggctttgaggcctgtggtggaaaaggaattatcttcccgtaaaagctagatagaagcattgtcagaaacttctttgtgatgattgcattcaactcacagtagttgaaggttccttttcaaacagcagtttccaatcactctttctgtggaatctgcaagtggatatttgggcctctctgaggatttcgttggaaacgggataaaacgcacagaactaaaacagaagcattctcagaaacttctctgtgatgtttgtgttcaactcccagagtttcacattgcttttcatagagtagttctgaaacatgcttttcgtagtgtctacaagtggacatttggagcgctttcaggcctgtggtggaaaacgaattatggtcacataaaaactggagagaagccttctcagaaacttctctgtgatgattgcattcaactcacagatttgaaccctcctatggatagagcattcttgaaactctctttttgtggaatctgcaagtggatatgtggacctctccgaagatgtctttggaaacgggaatatcttcacataaaaactaaacagaagcattctcagaaacttcttggtgatgtttgcattcaaatcccagagttgaaccttcctgtgatagttcaggtttgaaacactctttttgtaggatctgcaagtggatatttggaccactctgtggccttcgttcgaaacgggtacatcttcacataaaatctagacagaagcattctcagaaaatactttgtgatgattgagtttaaatcacagagctgaccattcctttggatggagcaggtttgagacacactttttgtagaatctacaagtggatatttggacctctctgaggatttcgttggaaacgggataactgcacctaactaaacggaagcattctcagaaactgctttgtgatgattgcattcacctcacagagttgaacattcctattgatagagcagtttggaaacactcttgttgtggaatgtgcaagtggagatttggagcgctttgaggcctatggtagtaaagggaatagcttcatagaaaaactagacagatgcattctcaggaactttttggtgatgtttgtattcaactcccagagttgaactttcctttggaaagagcagctatgaaacactctttttctagaatctgcaagtggacgtttggagggctttgtggtttgtggtggaaaaggaaatatcttcacctaaatactagatagaagcattctcagaagcttctctgtgatgactgcattcaactcacggagttgaacactccttttgagagcgcagttttgaaactcactttctgtggcatctgcaaggggacatgtagacctctttgaagatttcgttggaaacggaatcatcttcacataaaaactatacagaaacagtctcagaatcttctttgtgatgtttgtattcaaatcccagagttgaactttcctttcaaagttcacgtttgaagcactctttttgcaggatctacaagtggatatttggaccactctgtgtccttcgttcgaaacgggtatatcttcacatgacatctagacagaagctttctcagaaaattctttgggatgattgagttgaactcacagagctgaacattccttgcgatgtagcagtttagaaacacactttctgcagaatctgcaagtgcatatttggacctctctgaggaattcgttggaaacgggataatttcagctgactaaaccgaagcattctcagaaccttcttcgtgatgtctgcattcaactcacagtgtggaacctttctttgatagttcaggtttgaaacactctttttgtagaaactgcaaggggataattgcacttctttgaggcctaccgtagtaaaggaaataacttcctatagaaagaagacagaagcattctcagaaccctctccgtgatgtttgcattcaactcacggtgctgaacctttcttggatagttcagctttgaaacactctttttgtagaaactgcaagtggatatttggtcctctctgaggatttctttagaaacgggataaaccgcacagaactaaacagaagcattctcagaaccttcttcgtgatgtttgcattcaactcacagtgttgaacctttctttgatagttcaggtttgaaacggtctttctgtagaaactgcaagtagatatttggacctctctgaggatttcgttggaaacgggataacccgcacagaactaaaacagaagcattcacagaaaactcttggtgacgtctgagtttaactcacagagctgaacattcctttggatggagcagtttcgaaacacactatttgtagaatctgcaagtggatatttgggcctctctgaggatttcgatggaaacgggataaaccgcacagaactaaaacagaagcattctgagaaactactttgtgatgattgcattcaagtcacagagctgaacattccctttgacagagcagtttggaaactctctttgtgtaaaatctgcaagtggagatatggaatgctttgaggactatggtagtaaaggaaatagcttcatataaaagctagacagtagcattctcagaaacttctttgtgatgcttgcattcaactcacagagttgaactttcctttcgagagagaagctttgaaacactctttttccagaatctgcaagtggacatttggagggctttgaggcctgtggtggaaaaggaattatcttcccgtaaaagctagatagaagcattgtcagaaacttctttgtgatgattgcattcaactcacaggagttgaaggttccttttcaaacagcagtttccaatcactctttctgtggaatctgcaagtggatatttcgacctctttgaagatttcgttggaaacgggagaatcttcacagaaaagctaaacagaagcattctcagaaacttctctgtgatgtttgtgttcaactcccagagtttcacgttgcttttcatagagtagttctgaaacatgcttttcgtagtgtctgcaagtggacatttggagcgctttcaggcctgtggtggaaaacgaattatggtcacataaaaactggagagaagccttctcagaaacttctctgtgatgattgcattcaactcacagagttgaaccctcctatggatagagcagtgttgaaactctctttttgtggaatctgcaagtggatatgtggacctctccgaagatgtctttggaaacgggaatatcttcacataaaaactaaacagaagcattctcagaaacttcttggtgatgtttgcattcaaatcccactgttgaaccttcctgtgatagttcaggtttgaaacactctttttgtaggatctgcaagtggatatttggaccactctgtggccttcgttcgaaacgggtacatcttcacataaaatctagacagatgcattctcaggaactttttggtgatgtttgtattcaactcccagagttgaactttcctttggaaagagcagctatgaaacactctttttctagaatctgcaagtggacgtttggagggctttgtggtttgtggtggaaaaggaaatatcttcacctaaatactggatagaagcattctcagaagcttctctgtgatgactgcattcaactcacggagttgaacactccttttgagagcgcagttttgaaactctctttctgtggcatctgcaaggggacatgtagacctctttgaagatttcgttggaaacggaatcatcttcacataaaaactatacagaagcagtctcagaatcttctttgtgatgtttgcattcaaatcccagagttgaactttcctttcaaagttcacgtttgaaacactctttttgcaggatctacaagtggatatttggaccactctgtgtccttcgttcgaaacgggtatatcttcacaggacatctagacagaagctttctcagaaaattctttgggatgattgagttgaactcacagagctgagcattccttgcgatgtagcagtttagaaacacactttctgcagaatctgcaagtgcatatttggacctctgtgaggaattcgttggaaacgggataatttcagctgactaaacagaagcattctcagaaccttcttcgtgatgtctgcattcaactcacagtgtggaacctttctttgatagttcaggtttgaaacactctttttgtagaaactgcaaggggataattgcactctttgaggagtaccgtagtaaaggaaataacttcctataaaaagaagacagaagaattctcagagccctcttcgtgatgtttgcattcaactcacagtgctgaacctttctttgatagtgcagctttgaaacactctttttgtagaaactgcaagtggatgtttggtcctctctgaggatttcgttggaaacgggataaaccgcacagaactaaaacagaagcattctcagaaccttcttcgtgatgtttgcattcaactcacagtgttgaacctttctttgatagttcaggttggaaacggtctttctgtagaaactgcaagtagatatttggacctctctgaggatttcgttggaaacgggataaaccgcacagaactaaaacagaagcattcacagaaaactcttggtgacgactgagtttaactcacagagctgaacattcctttggatggagcagtttcgaaacacactatttgtagaatgtgcaagtggatatttgggcctctctgaggatttcgttggaaacgggataaaccgcacagaactaaacagaagcattctcagaaactactttgtgatgattgcattcaagtcacagagttgaacattccctttgacagagcagtttggaaactctctttgtgtagaatctgcaagtggagatatggaccgctttgaggcctatggtagtaaaggaaatagcttcatataaaagctagacagtagcattctcagaaacttctttgtgatgcttgcattcaactcacagagttgaactttcctttcgagagagaagctttgaaacactctttttccagaatgtgcaagtggacatttggggagctttgaggcctgtggtggaaaaggaattatcttcccgtaaaagctagatagaagcattgtcagaaacttctttgtgatgattgcattcaactcacagagttgaaggttccttttcaaacagcagtttccaatcactctttctgtggaatctgcaagtggatatttgggcctctctgaggatttcgttggaaacgggataaaacgcacagaactaaaacagaagcattctcagaaacttctctctgatatttgtgttcaactcccagagtttcacattgcttttcatagagtagttctgaaacatgcttttcgtagtgtctgcaagtggacatttggagcactttcaggcctgtggtggaaaacgaattatggtcacataaaaactggagagaagccttctcagaaacttctctgtgatgattgcattcaactcacagagttgaaccctcctatggatagagcagtgttgaaactctctttttgtggaatctgcaagtggatatgtggacctctccgaagatgtctttggaaacgggactatcttcacataaaaactaaacagaagcactctcagaaacttcttggtgatgtttgcattcaaatcccagagttgaaccttcctttgatagttcaggtttgaaacactctttttgtaggatctgcaagtggatatttggaccactctgtggccttcattcgaaacgggtacatcttcgcataaaatctagacagaagcattctcagaaaatactttgtgatgattgactttaactcacagagctgaacattcctttggatggagcaggcttgagacacactttttgtagaatctacaagtggatatttggacctctctgaggatatcgttggaaacgggataactgcaccttactaagtggaagcattctcagaaactgctttgtgatgattgcattcacctcacagagttgaacattcctattgatagagcagtttggaaacactcttgttgtggaatgtgcaagtggagatttggagcgctttgaggcctatggtagtaaagggaatagcttcatagaaaaactagacagatgcattctcaggaactttttggtgatgtttgtattcaactcccagagttgaactttcctttggaaagagcagctatgaaacactctttttctagaatctgcaagtggacgtttggagggctttgtggtttgtggtggaaaaggaaatatcttcacctaaatactagatagaagcattctcagaagcttctctgtgatgactgcattcaactcacggagttgaacactccttttgagagcgcagttttgaaactctctttctgtggcatctgcaaggggacatgtagacctctttgaagatttcgttggaaacggaatcatcttcacataaaaactatacagaagcagtctcagaatcttctttgtgatgtttgcattcaaatcccagagttgaactttcctttcaaagttcacgtttgaaacactctttttgcaggatctacaagtggatatttggaccactctgtgtccttcgttcgaaacgggtatatcttcacacgacatctagacagaagctttctcagaaaattctttgggatgattgagtggaactcacagagctgaacattccttgcgatgtagcagtttagaaacacactttctgcagaatctgcaagtgcatatttggacctctctgaggaattcgttggaaacgggataatttcagctgactaaacagaagcattctcagaaccttcttcgtgatgtctgcattcaactcacagtgtggaacctttctttgatagttcaggtttgaaacactctttttgtagaaactgcaaggggataattgcacttctttgaggcctaccgtagtaaaggaaataacttcctatagaaagaagacagaagaattctcagagccctcttcgtgatgtttgcattcaactcacagtgctgaacctttctttgatagtgcagctttgaaacactctttttgtagaaactgcaagtggatatttggtcctctctgaggatttcgttggaaacgggataaaccgcacagaactaaaacagaagcattctcagaaccttcttcgtgatgtttgcattcaactcacagtgttgaacctttctttgatagttcaggtttgaaacggtctttctgtagaaactgcaagtagatatttggacctctctgaggatttcgttggaaacgggataacccgcacagaactaaaacagaagcattcacagaaaactcttggtgacgactgagtttaactcacagagctgaacattcctttggatggagcagtttcgaaacacactatttgtagaatctgcaagtggatatttgggcctctctgaggatttcgttggaaacgggataaaccgcacagaagtaaacagaagcattctcagaaactactttgtgatgattgcattcaagtcacagagttgaacattccctttgacagagcagtttggaaactctctttgtgtagaatctgcaagtggagatatggaccgctttgaggcctatggtagtaaaggaaatagcttcatataaaagctagacagtagcattctcagaaacttctttgtgatgcttgcattcaactcacagagttgaactttcctttcgagagagaagctttgaaacactctttttccagaatctgcaagtggacatttggagggctttgaggcctgtggtggaaaaggaattatcttcccgtaaaagctagatagaagcattgtcagaaacttctttgtgatgattgcattcaactcacagagttgaaggttccttttcaaacagcagtttccaatcactctttctgtggaatctgcaagtggatatttgggcctctctgaggatttcgttggaaacgggataaaacgcacagaactaaaacagaagcattctcagaaacttctctgtgatgtttgtgttcaactcccagagtttcacgttgcttttcatagagtagttctgaaacatgcttttcgtagtgtctgcaagtggacatttggagcgctttcaggcctgtggtggaaaacgaattatggtcacataaaaactggagagaagccttctcagaaacttctctgtgatgattgcattcaactcacagagttgaaccctcctatggatagagcagtgttgaaactctctttttgtggaatctgcaagttgatatgtggacctctccgaagatgtctttggaaacgggaatatcttcacataaaaactaaacagaagcattctcagaaacttcttggtgatgtttgcattcaaatcccagagttgaaccttcctttgatagttcaggtttgaaacactctttttgtaggatctgcaagtggatatttggaccactctgtggccttcgttcgaaacgggtacatcttcgcataaaatctagacagaagcattctcagaaaatactttgtgatgattgagttgaactcacagagctgaacattcctttggatggagcaggtttgagacacactttttgtagaatctacaagtggatatttggacctctctgaggatttcgttggaaacgggataactgcacctaactaaacggaagcattctcagaaactgctttgtgatgattgcattcacctcacagagttgaacattcctattgatagagcagtttggaaacactcttgttgtggaatgtgcaagtggagatttggagcgctttgaggcctatagtagtaaagggaatagcttcatagaaaaactagacagatgcattctcaggaactttttggtgatgtttgtattcaactcccagagttgaactttcctttggaaagagcagctatgaaacactgtttttctagaatctgcaagtggacgtttggagggctttgtggtttgtggtggaaaaggaaatatcttcacctaaatactagatagaagcattctcagaagcttctctgtgatgactgcattcaactcacggagttgaacactccttttgagagcgcagttttgaaactctctttctgtggcatctgcaaggggacatgtagacctctttgaagatttcgttggaaacggaatcatcttcacatcaaaactatacagaagcagtctcagaatcttctttgtgatgtttgcattcaaatcccagagttgaacttgcctttcaaagttcacgtttgaaacactctttttgcaggatctacaagtggatatttggaccactctgtgtccttcgttcgaaacgggtatatcttcacatgacatctagacagaagctttctcagaaaattctttgggatgattgagttgagcaaacagagctgaacactccttgcgatgtagcagtttagaaacacactttctgcagaatctgcaagtgcatatgtggacctctctgaggaattcgttggaaacgggataatttcagctgactaaacagaagcattctcagaaccttcttcgtgatgtctgcattcaactcacagtgtggaacctttctttgatagttcaggtttgaaacactctttttgtagaaactgcaaggggataattgcacttctttgaggcctaccgtagtaaaggaaataacttcctatagaaagaagacagaagcattctcagaaccctcttcgtgatgtttgcattcaactcacagtgctgaacctttctttgatagttcagctttgaaacactcttcttgtagaaactgcaagtggatatttggtcctctctgaggatttcgttggaaacgggataaaccgcacagaactaaacagaagcattctcagaaccttcttcgtgatgtttgcattcaactcacagtgttgaacctttctttgatagttcaggtttgaaacggtctttctgtagaaactgcaagtagatatttggacctctctgaggatttcgttggaaacgggataaaccgaacagaactaaaacagaagcattcacagaaaactcttggtgacgactgagtttaactcacagagctgaacatccctttggatggagcagtttcgaaacacactatttgtagaatgtgcaagtggatattggggcctctctgaggatttcgttggaaacgggataaaccgcacagaactaaacagaagcattctcagaaactactttgtgatgattgcattcaagtcacagagttgaacattccctttgacagagcagtttggaaactctctttgtgtagaatctgcaagtggagatatggaccgctttgaggcctatggtagtaaaggaaatagcttcatataaaagctagacagtagcattctcagaaacttctttgtgatgcttgcattcaactcacagagttgaactttcctttcgagagagaagctttgaaacactctttttccagaatctgcaagtggacatttggagggctttgaggcctgtggtggaaaaggaattatcttcccgtaaaagctagatagaagcattgtcagaaacttctttgtgatgattgcattcaactcacagagatgaaggttcctttacaaacagcagtttccaaacactctttctgtggaatttgcaagtggatatttggacctctttgaagatttcgttggaaacgggagaatcttcacagaaaagctaaacagaagcattctcagaaacttctctgtgatgtttgtgttcaactcccagagtttcacattgcttttcatagagtagttctgaaacatgcttttcgtagtgtctgcaagtggacatttggagcgctttcaggcctgtggtggaaaacgaattatggtcccataaaaactggagagaagccttctcagaaacttctctgtgatgattgcattcaactcacagagttgaaccctcctatggatagagcattgttgaaactctctttttgtggaatctgcaagtggatatgtggacctctccgaagatgtctttggaaacgggaatatcttcacataaaaactaaacagaagcattctcagaaacttcttggtgatgtttgcattcaaatcccagagttgaaccttcctttgatagttcaggtttgcaacactctttttgtaggatctgcaagtggatatttggaccactctgtggccttcgttcgaaacaggtacatcttcacataaaatctagacagaagcattctcagaaaatactttgtgatgattgggttgaactcacagagctgaacattcctttggatggagcaggtttgagacacactttttgtagaatctacaagtggatatttggacctctctgaggatttcgttggaaacgggataactgcacctaactaaacggaagcattctcagaaactgctttgtgatgattgcattcacctcacagagttgaaaattcctattgatagagcagtttggaaacactcttcttgtggaatgtgcaagtggagatttggagcgctttgaggcctatggtactaaagggaatagcttcatagaaaaactagacagatgcattctcaggaactttttggtgatgtttgtattcaactcccagagttgaactttcctttggaaagagcagctatgaaacacactttttctagaatctgcaagtggacgtttggagggctttgtggtttgtggtggaaaaggaaatatcttcacctaaatactagatagaagcattctcagaagcttctctgtgatgactgcattcaactcacggagttgaacactccttttgagagcgcagttttgaaactctctttctgtggcatctgcaaggggacatgtagacctctttgaagatttcgttggaaacggaatcatcttcacataaaaactatacagaagcagtctcagaatcttctttgtgatgtttgcattcaaatcccagagttgaactttcctttcaaagttcacgtttgaaacactctttttgcaggatctacaagtggatatttttaccactctgtgtccttcgttcgaaacgggtatatcttcacatgacatctagacagaagctttctcagaaaattctttgggatgattgagtggaactcacagagctgaacattccttgcgatgtagcagtttagaaacacactttctgcagaatctgcaagtgcatatttggacctctctgaggaattcgttggaaacgggataatttcagctgactaaacagaagcattctcagaaccttcttcgtgatgtctgcattcaactcacagtgtggaacctttctttgatagttcaggtttgaaacactctttttgtagaaactgcaaggggataattgcacttctttgaggcctaccgtagtaaaggaaataacttcctatagaaagaagacagaagcaatctcagaaccctcttcgtgatgtttgcattcaactcacggtgctgaacctttctttgatagttcagctttgaaacactctttttgtagaaactgcaagtggatatttggtcctctctgaggatttcgttggaaacgggataaaccgcacagaactaaacagaagcattctcagaaccttcttcgtgatgtttgcattcaaatcacagtgttgaacctttctttgatagttcaggtttgaaacggtctttctgtagaaactgcaagtagatatttggacctctctgaggatttcgttggaaacgggataaaccgcacagaactaaaacagaagcattcacagaaaactcttggtgacgactgagtttaactcacagagctgaacattcctttggatggagcagtttcgaaacacactatttgtagaatgtgcaagtggatatgtgggcctctctgaggatttcgttggaaacgggataaaccgcacagaactaaacagaagcattctcagaaactactttgtgatgattgcattcaagtcacagagttgaacattccctttgacagagcagtttggaaactctctttgtgtagaatctgcaagtggagatatggaccgctttgaggcctatggtagtaaaggaaatagcttcatataaaagctagacagtagcattctcagaaacttctttgtgatgcttgcattcaactcacagagttgaactttcctttcgagagagaagctttgaaacactctttttccagaatctgcaagtggacatttggagggctttgaggcctgtggtggaaaaggaattatcttcccgtaaaagctagatagaagcattgtcagaaacttctttgtgatgattgcattcaactcacagagttgaaggttccttttcaaacagcagtttccaatcactctttctgtggaatctgcaagtggatatttgggcctctctgaggatttcgttggaaacgggataaaacgcacagaactaaaacagaagcattctcagaaacttctctgtgatgtttgtgttcaactcccagagtttcacgttgcttttcatagagtagttctgaaacatgcttttcgtagtgtctgcaagtggacatttggagcgctttcaggcctgtggtggaaaacgaattatggtcacataaaaactggagagaagccttctcagaaacttctctgtgatgattgcattcaactcacagagttgaaccctcctatggatagagcagtgttgaaactctctttttgtggaatctgcaagtggatatgtggacctctccgaagatgtctttggaaacgggaatatcttcacataaaaactaaacagaagcattctcagaaacttcttggtgatgtttgcattcaaatcccagagttgaaccttcctttgatagttcaggtttgaaacactctttctgtaggatctgcaagtggctatttggaccactctgtggccttcgttcgaaacgggtatatcttcgcataaaatctagacagaagcattctcagaaaatactttgtgatgattgagttgaactctcagagctgaacattcctttggatggagcaggtttgagacacactttttgtagaatatacaagtagatatttggacctctctgaggatttcgttggaaacgcgataactgcacctaactaaacggaagcattctcagaaactgctttgtgatgattgcattcacctcacagagttgaacattcctattgatagagcagtttggaaacactcttgttgtggaatgtgcaagtggagatttggagcgctttgaggcctatggtagtaaagggaatagctccatagaaaagctagacagatgcattctcaggaactttttggtgacgtttgtattcaactcccagacttgaaatttcctttggaaagagcagctatgaaacactctttttctagaatctgcaagtggacgtttggagggctttgtggtttgtggtggaaaaggaaatatcttcacctaaatactagatagaagcattctcagaagcttctctgtgatgactgcattcaactcacggagttgaacactccttttgagagcgcagttttgaaactctctttctgtggcatctgcaaggggacatgtagacctctttgaagatttcgttggaaacggaatcatcttcacataaaaactatacagaagcagtctcagaatcttctttgtggtgtttgcattcaaatcccagagttgaactttcctttcaaagttcacgtttgaaacactctttttgcaggatctacaagtggatatttggaccactctgtgtccttcgttcgaaacgggtatatcttcacatgacatctagacagaagctttctcagaaaattctttgggatgattgagtggaactcacagagctgaacattccttgcgatgtagcagtttagaaacacactttctgcagaatctgcaagtgcatatttggacctctctgaggaattcgttggaaacgggataatttcagctgactaaacagaagcattctcagaaccttcttcgtgatgtctgcattcaactcacagtgtggaacctttctttgatagttcaggtttgaaacactctttttgtagaaactgcaaggggataattgcacttctttgaggcctaccgtagtaaaggaaataacttcctatagaaagaagacagaagatttctcagaaccctcttcgtgatgtttgcattcaactcacagtgctgaacctttctttgatagttcagctttgaaacactcttcttgtagaaactgcaagtggatatttggtcctctctgaggatttcgttggaaacgggataaaccgcacagaactaaacagaagaattctcagagccctcttcgtgatgtttgcattcaactcacagtgctgaacctttctttgatagtgcagctttgaaacactatttttgtagaaactgcaagtggatgtttggtcctctctgaggatttcgttggaaacgggataaaccgcacagaactaaaacagaagcattgtcagaaacttctttgtgatgattgcattcaactcacagagttgaaggttccttttcaaacagcagtttccaatcactctttctgtggaatctgcaagtggatatttgggcctctctgaggatttcgttggaaacgggataaaaggcacagaactaaaacagaagcattctcagaaacttctctgtgatgtttgtgttcaactcccagagtttcacgttgcttttcatagagtagttctgaaacatgcttttcgtagtgtctgcaagtggacatttggagcgctttcaggcctgtggtggaaaacgaattatggtcacataaaaactggagagaagccttctcagaaacttctctgtgatgattgcattcaactcacagagttgaaccctcctatggatagagcagtgttgaaactctctttttgtggaatctgcaagtggatatgtggacctctccgaagatgtctttggaaacgggaatatcttcacataaaaactaaacagaagcattctcagaaacttcttagtgatgtttgcattcaaatcccagagttgaaccttcctttgatagttcaggtttgaaacactctttttgtaggatctgcaagtggatatttggaccactctgtggccttcgttcgaaacgggtacatcttcgcataaaatctagacagaagcattctcagaaaatactttgtgatgattgagttgaactcacagagctgaacattcctttggatggagcaggtttgagacacacttcttgtagaatctacaagtggatatttggacctactcctgaggatttcgttgggaacgggataactgcacctaactaaacggaagcattctcagaaactgctttgtgatgattgcattcacctcacagagttgaacatttctattgatagagcagtttggaaacactcttgttgtggaatgtgcaagtggagatttggagcgttttgaggcctatggtattagagggaatagcttcatagaaaaactagacagatgcattctcaggaactttttggtgatgtttgtattcaactccgagagttgaactttcctttggaaagagcagctatgaaacactctttttctagaatctgcaagaggacgtttggagggctttgtggtttgtggtggaaaaggaaatatcttcacctaatatactagatagaagcattctcagaagcttctctgtgatgactgcattcaactcacggagttgaacactccttttgagagcgcagttttgaaactctctttctgtggcatctgcaaggggacatgtagacctctttgaagatttcgttggaaacggaattcatcttcacataaaaactatacagaagcagtctcagaatcttctttgtgatgtttgcattcaaatcccagagttgaactttcctttcaaagttcacgtttgaaacactctttttgcaggatctacaagtggatatttggaccactctgtgtccttcgttcgaaacgggtatatcttcacatgacatctagacagaagctttctcagaaaattctttgggatgattgagttgaactcacagagctgaacattccttgcgatggagcagtttagaaacacactttctgcagaatctgcaagtgcatatttggacctctctgaggaattcgttggaaacgggataatttcagctgactaaacagaagcattctcagaaccttcttcgtgatgtctgcattcaactcacagtgtggaacctttctttgatagttcaggtttgaaacactctttttgtataaactgcaaggggataattgcacttctttgaggcctaccgtagtaaaggaaataacttcctatagaaagaagacagaagcattctcagaaccctcttcgtgatgtttgcattcaactcacagtgctgaacctttctttgatagttcagctttgaaacactctttttgtagaaactgcaagtggatatttggtcctctctgagcatttcgttggaaacgggataaactgcacagaactaaacagaagcattctcagaaccttcttcgtgatgtttgcattcaactcacagtgttgaacctttctttgatagttcaggtttgaaacggtctttctgtagaaactgcaagtagatatttggacctctctgaggatttcgttggaaacggggtaacccgcacagaactaaaacagaagcattcacagaaaactcttggtgacgactgagtttaactcacagagctgaacattcctttggatggagcagtttcgaaacacactatttgtagaatgtgcaagtggatatttaggcctctctgaggatttcgttggaaacgggataaaccgcacagaactaaacagaagcattctcagaaactactttgtgatgattgcattcaagtcacagagttgaacattccctttgacagagcagtttggaaactctctttgtgtagaatctgcaagtggagatatggaccgctttgaggcctatggtagtaaaggaaatagcttcatataaaagctagacagtagcattctcagaaacttctttgtgatgcttgcattcaactcacagagttgaactttcctttcgagagagaagctttgaaacactctttttccagaatctgcaagtggacatttggagggctttgaggcctgtggtggaaaaggaattatcttcccgtaaaagctagatagaagcattgtcagaaacttctttgtgatgattgcattcaactcacagagttgaaggttccttttcaaacagcagtttccaatcactctttctgtggaatctgcaagtggatatttgggcctctctgaggatttcgttggaaacgggataaaacgcacagaactaaaacagaagcattctcagaaacttctctgtgatgtttgtgttcaactcccagagtttcacattgcttttcatagagtagttctgaaacatgcttttcgtagtgtctacaagtggacatttggagcgctttcaggcctgtggtggaaaacgaattatggtcacataaaaactggagagaagccttctcagaaacttctctgtgatgattgcattcaactcacagagttgaaccctcctatggatagagcagtgttgaaactctctttttgtggaatctgcaagtggatatgtggacctctccgaagatgtctttggaaacgggaatatcttcacataaaaactaaacagaagcattctcagaaacttcttggtgatgtttgcattcaaatcccagagttgaaccttcctttgagagttcaggtttgaaacactctttttgtaggatctgaaagtggatatttggaccactctgtggccttcgttcgaaacgggtacatcttcgcataaaatctagacagaagcattctcagaaaatactttgtgatgattgagtttaaatcacagagctgaccattcctttggatggagcaggtttgagacacactttttgtagaatctacaagtggatatttggacctctctgaggatttcgttggaaacgggataactgcacctaactaaacggataagcattctcagaaactgctttgtgatgattgcattcacctcacagagttgaacattcctattgatagagcagtttggaaacactcttgttgtggaatgtgcaagtggagatttggagcgctttgaggcctgtggtagtaaagggaatagcttcatagaaaaactagacagatgcattctcaggaactttttggtgatgtttgtattcaactcccagagttgaactttcctttggaaagagcagctatgaaacactctttttctagaatctgcaagtggacgtttggagggctttgtggtttgtggtggaaaaggaaatatcttcacctaaatactagatagaagcattctcagaagcttctctgtgatgactgcattcaactcacggagttgaacactccttttgagagcgcagttttgaaactctctttctgtggcatctgcaaggggacatgtagacctctttgaagatttcgttggaaacggaatcatcttcacataaaaactatacagaagcagtctcagaatcttctttgtgatgtttgcattcaaatcccagagttgaactttcctttcaatgttcacgtttgaaacactctttttgcaggatctacaagtggatatttggaccactctgtgtccttcgttcgaaacgggtatatcttcacatgacatctagacagaagctttctcagaaaattctttgggatgattgagtggaactcacagagctgaacattccttgcgatgtagcagtttagaaacacactttctgcagaatctgcaagtgcatatttggacctctctgaggaattcgttggaaacgggataatttcagctgactaaacagaagcattctcagaaccttcttcgtgatgtctgcattcaactcacagtgtggaacctttctttgatagttcaggtttgaaacactctttttgtagaaactgcaaggggataattgcacttctttgaggcctaccgtagtaaaggaaataacttcctatagaaagaagacagaagcattctcagagccctcttcgtgatgtttgcattcaactcacagtgctgaacctttctttgatagtgcagctttgaaacactctttttgtagaaactgcaagtggatatttggtcctctctgaggatttcgttggaaacgggataaactgcacagaactaaaacagaagcattctcagaaccttcttcgtgatgtttgcattcaactcacagtgttgaacctttctttgatagttcaggtttgaaacggtctttctgtagaaactgcaagtagatatttggacctctctgaggatttcgttggaaacgggataaaccgcacagaactaaaacagaagcattcacagaaaacacttggtgacgactgagtttaactcacagagctgaacattcctttggatggagcagtttcgaaacacactctttgtagaatctgcaagtggatatttgggcctctctgaggatttcgttggaaacgggataaaccgcacagaactaaaacagaagcattctgagaaactactttgtgatgattgcatttaagtcacagagctgaacattccctttgatagagcagtttggaaactctctttgtgtagaatctgcaagtggagatatggaatgctttgaggactatggtagtaaaggaaatagtttcatataaaagctagacagtagcattctcagaaacttctttgtgatgcttgcattcaactcacagagttgaactttcctttcgagagagaagctttgaaacactctttttccagaatctgcaagtggacatttggagggctttgaggcctgtggtggaaaaggaattatcttcccgtaaaagctagatagaagcattgtcagaaacttctttgtgatgattgcattcaactcacagagatgaaggttcctttacaaacagcagtttccaaacactctttctgtggaatctgcaagtggatatttggacctctttgaagatttcgttggaaacgggagaatcttcacagaaaagctaaacagaaacattctcagaaacttctctgtgatgtttgtgttcaactcccagagtttcacattgcttctcatagagtagttctgaaacatgcttttcgtagtgtctacaagtggacatttggagcgctttcaggcctgtggtggaaaacgaattatggtcacataaaaactggagagaagccttctcagaaacttctctgtgatgattgcattcaactcacagagttgaaccctcctatggatagagcagtgttgaaactctctttttgtggaatctgcaagtggatatgtggacctctccgaagatgtctttggaaacgggaatatcttcacataaaaactaaacagaagcattctcagaaacttcttggtgatgtttgcattcaaatcccagagttgaaccttcctgtgatagttcaggtttgaaacacactttttgtaggatctgcaagtggatatttggaccactctgtggccttcgttcgaaacgggtacatcttcgcataaaatctagacagaaggattctcagaaaatactttgtgatgattgagtttaactcacagagctgaacattcctttggatggagcaggtttgagacacactttttgtagaatctacaagtggatatttggacctctctgagaatttcgttggaaacgggataactgcacctaactaaacggaagcattctcagaaactgctttgtgatgattgcattcacctcacagagttgaacattcctattgatagagcagtttggaaacactcttgttgtggaatgtgcaagtggagatttggagcgctttgaggcctatggtagtaaagggaatagcttcatagaaaaactagacagatgcattctcaggaactttttggtgatgtttgtattcaactcccagagttgaactttcctttggaaagagcagctatgaaacactctttttctagaatctgcaagtggacgtttggagggctttgtggtttgtggtggaaaaagaaatatcttcacctaaatactagatagaagcattctcagaagcttctctgtgatgactgcattcaactcacggagttgaacactccttttgagagcgcagttttgaaactctctttctgtggcatctgcaaggggacatgtagacctctttgaagatttcgttggaaacggaatcatcttcacataaaaactatacagaagcagtctcagaatcttctttgtgatgtttgcattcaaatcccagagttgaactttcgtttcaaatttcacgtttgaaacactctttttgcaggatctacaagtggatatttggaccactctgtgtccttcgttcgaaacgggtatatcttcacatgacatctagacagaagctttctcagaaaattctttgggatgattgagtggaactcacagagctgaacattccttgcgatgtagcagtttagaaacacactttctgcagaatctgcaagtgcatatttggacctctctgaggaattcgttggaaacgggataatttcagctgactaaacagaagcattctcagaaccttcttcgtgatgtctgcattcaactcacagtgtggaacctttctttgatagttcaggtttgaaacactctttttgtagaaactgcaaggggatcattgcacttctttgaggcctaccgtagtaaaggagataacttcctataaaaagaagacagaagcattctcagaaccctcttcgtgatgtttgcattcaactcacagtgctgaacctttctttgatagttcagctttgaaacactctttttgtagaaactgcaagtggatatttggtcctctctgagcatttcgttggaaacgggataaactgcacagaactaaacagaagcattctcagaaccttcttcgtgatgtttgcattcaactcacagtgttgaacctttctttgatagttcaggtttgaaacggtctttctgtagaaactgcaagtagatatttggacctctctgaggatttcgttggaaacgggataacccgcacagaactaaaacagatagcattcacagtaaaactcttggtgacgactgagtttaactcacagagctgaacattcctttggatggagcagtttcgaaacacactatttgtagaatctgcaagtggatatttgggcctctctgaggatttcgttggaaacgggataaaacgcacagaactaaaacagaagcattctcagaaactactttgtgatgattgcattcaagtcacagtagttgaacattccctttgacagagcagtttggaaactctctttgtgtagaatctgcaagtggagatatggaccgctttgaggcctatggtagtaaaggaaatagcttcatataaaagctagacagtagcattctcagaaacttctttgtgatgcttgcattcaactcacagagttgaactttcctttcgagagagaagctttgaaacactctttttccagaatctgcaagtggacatttggagggctttgaggcctgtggtggaaaaggaattatcttcccgtaaaagctagatagaagcattgtcagaaacttctttgtgatgattgcattcaactcacagagatgaaggttcctttacaaacagcagtttccaaacactctttctgtggaatctgcaagtggatatttggacctctttgaagatttcgttggaaacgggagaatcttcacagaaaagctaaacagaagcattctcagaaacttctctgtgatgtttgtgttcaactcccagagtttcacgttgcttttcatagagtagttctgaaacatgcttttcgtagtgtctgcaagtggacatttggagcgctttcaggcctgtggtggaaaacgaattatggtcacataaaaactggagagaagccttctcagaaacttctctgtgatgattgcattcaactcacagagttgaaccctcctatggatagagcagtgttgaaactctctttttgtggaatctgcaagtggatatgtggacctctccgaagatgtctttggaaacgggaatatcttcacataaaaactaaacagaagcattctcagaaacttcttggtgatgtttgcattcaaatcccagagttgaaccttcctttgatagttcaggtttgaaacactctttctgtaggatctgcaagtggctatttggaccactctgtggccttcgttcgaaacgggtatatcttcgcataaaatctagacagaagcattctcagaaaatactttgtgatgattgagtttaaatcacagagctgaccattcctttggatggagcaggtttgagacacactttttgtagaatctacaagtggatatttggacctctctgaggatttcgttggaaacgggataactgcacctaactaaacggaagcattctcagaaactgctttgtgatgattgcattcacctcacagagttgaacattcctattgatagagcagtttggaaacactcttgttgtggaatgtgcaagtggagatttggagcgctttgaggcctatggtagtaaagggaatagcttcatagaaaaagtagacagatgcattctcaggaactttttggtgatgtttgtattcaactcccagagttgaactttcctttggaaagagcagctatgaaacactctttttctagaatctgcaagtggacgtttggagggctttgtggtttgtggtggaaaaggaaatatcttcacctaaatactagatagaagcattctcagaagcttctctgtgatgactgcattcaactcacggagttgaacactccttttgagagcgcagttttgaaactctctttctgtggcatctgcaaggggacatgtagacctctttgaagatttcgttggaaacggaatcatcttcacataaaaactatacagaagcagtctcagaatcttctttgtgatgtttgcattcaaatcccagatttgaactttcctttcaaagttcacgtttgaaacactctttttgcaggacctacaagtggatatttggaccactctgtgtccttcgttcgaaacgggtatatcttcacatgacatctagacagaagctttctcagaaaattctttgggatgattgagttgagcaaacagagctgaacactccttgcgatgtagcagtttagaaacacacgttctgcagaatctgcaagtgcatatgtggacctctctgaggaattcgttggaaacgggataatttcagctgactaaacagaagcattctcagaaccttcttcgtgatgtctgcattcaactcacagtgtggaacctttctttgatagttcaggtttgaaacactctttttgtagaaactgcaaggggatcattgcacttctttgaggcctaccgtagtaaaggagataacttcctataaaaagaagacagaagcattctcagaaccctcttcggatgtttgcattcaactcacagtgctgaacctttctttgatagttcagctttgaaacactcttcttgtagaaactgcaagtggatatttggtcctctgtgaggatttcgttggaaacgggataaaccgcacagaactaaacagaagcattctcagaaccttcttcgtgatgtttgcattcaactcacagtgttgaacctttctttgatagttcaggtttgaaacggtctttctgtagaaactgcaagtagatatttggacctctctgaggatttcgttggaaacgggataacccgcacagaactaaaacagaagcattcacagaaaactcttggtgacgactgagtttaactcacagagctgaacattcctttggagggagcagtttcgaaacacactatttatagaatgtgcaagtggatatttgggcctctctgaggatttcgttggaaacgggataaatggcaaagaaataaacagaagcattctcagaaactactttgtgatgattgcattcaagtcacagagttgaacattccctttgacagagcagtttggaaactctctttgtgtagaatctgcaagtggagatatggaccgctttgaggcctatggtagtaaaggaaatagcttcatataaaagctagacagtagcattctcagaaacttctttgtgatgcttgcattcaactcagagagttgaactttcctttcgagagagaagctttgaaacactctttttccagaatctgcaagtggacatttggagggctttgaggcctgtggtggaaaaggaattatcttcccgtaaaagctagatagaagcattgtcagaaacttctttgtgatgattgcattcaactcacagagttgaaggttccttttcaaagagcagtttccaatcactctttctgtggaatctgcaagtggatatttggacctattttgaagatttcgttggaaacgggagaatcttcacaggaaagctaaacagaagcattctcagaaacttctctgtgatgtttgtgttcaactcccagagtttcacattgcttttcatagagtagttctgaaacatgcttttcgtagtgtctacaagtggacatttggagcgctttcaggcctgtggtggaaaacgaattatggtcacataaaaactggagagaagccttctcagaaacttctctgtgatgattgcattcaactcacagagttgaaccctcctatggatagagcagtgttgaaactctctttttgtggaatctgcaagtggatatgtggacctctccgaagatgtctttggaaacgggaatatcttcacataaaaactaaacagaagcattctcagaaacttcttggtgatgtttgcattcaaatcccagagttgaaccttcctttgatagttcaggtttgaaacactctttttgtaggatctgcaagtggctatttggaccactctgtggccttcgttcgaaacgggtatatcttcgcataaaatctagacagaagcattctcagaaaatactttgtgatgattgagtttaaatcacagagctgaccattcctttggatggagcaggtttgagacacactttttgtagaatctacaagtggatatttggacctctctgaggatttcgttggaaacgggataactgcacctaactaaacggaagcattctcagaaactgctttgtgatgattgcattcacctcacagagttgaacattcctattgatagagcagtttggaaacactcttcttgtggaatgtgcaagtggagatttggagcgctttgaggcctatggtagtaaagggaatagcttcatagaaaaactagacagatgcattctcaggaacattttggtgatgtttgtattcaactcccagagttgaactttcctttggaaagagcagctatgaaacactctttttctagaatctgcaagtggacatttggagggctttgtggtttgtggtggaaaaggaaatatcttcacctaaatactacatagaagcattctcagaagcttctctgtgatgactgcattcaactcacggagttgaacactccttttgagagcgcagttttggaactctctttctgtggcatctgcaaggggacatgtagacctctttgaagatttcgttggaaacggaatcatcttcacataaaaactatacagaagcagtctcagaatcttctttgtgatgtttgcattcaaatcccagagttgaactttcctttcaaagttcacgtttgaaacactctttttgcaggatctacaagtggatatttggaccactctgtgtccttcgttcgaaacgggtatatcttcacacgacatctagacagaagctttctcagaaaattctttgggatgattgagttgaactcacagagctgagcattccttgcgatgtagcagtttagaaacacactttctgcagaatctgcaagtgcatatttggacctctgtgaggaattcgttggaaacgggataatttcagctgactaaacagaagcattctcagaaccttcttcgtgatgtctgcattcaactcacagtgtggaacctttctttgatagttcaggtttgaaacactctttttgtagaaactgcaaggggataattgcacttctttgaggcctaccgtagtaaaggaaataacttcctatagaaagaagacagaagaattctcagagccctcttcgtgatgtttgcattcaactcacagtgctgaacctttctttgatagtgcagctttgaaacactctttttgtagaaactgcaagtggatgtttggtcctctctgaggatttcgttggaaacgggataaaccgcacagaactaaaacagaagcattctcagaaccttcttcgtgatgtttgcattcaactcacagtgttgaacctttctttgatagttcaggtttgaaacggtctttctgtagaaactgcaagtagatatttggacctctctgaggatttcgttggaaacgggataacccgcacagaactaaaacagaagcattcacagaaaactcttggtgacgactgagtttaactcacagagctgaacattcctttggatggagcagtttcgaaacacactatttgtagaatgtgcaagtggatattggggcctctctgaggatttcgttggaaacaggataaaccgcagagaactaaacagaaacattctcagaaactactttgtgatgattgcattcaagtcacagagttgaacattccctttgacagagcagtttggaaactctctttgtgtagaatctgcaagtggagatatgggaccgctttgaggcctatggtagtaaaggaaatagcttcatataaaagctagacagtagcattctcagaaacttctttgtgatgcttgcattcaactcacagagttgaactttcctttcgagagagaagctttgaaacactctttttccagaatctgcaagtggacatttggagggctttgaggcctgtggtggaaaaggaattatcttcccgtaaaagctagatagaagcattgtcagaaacttctttgtgatgattgcattcaactcacagagttgaaggttccttttcaaacagcagtttccaatcactctttctgtggaatctgcaagtggatatttcgacctctttgaagatttcgttggaaacgggagaatcttcacagaaaagctaaacagaagcattctcagaaacttctctgtgatgtttgtgttcaactcccagagtttcacgttgcttttcatagagtagttctgaaacatgcttttcgtagtgtctgcaagtggacatttggagcgctttcaggcctgtggtggaaaacgaattatggtcacataaaaactggagagaagccttctcagaaacttctctgtgatgattgcattcaactcacagagttgaaccctcctatggatagagcagtgttgaaactctctttttgtggaatctgcaagtggatatgtggacctctccgaagatgtctttggaaacgggaatatcttcacataaaaactaaacagaagcattctcagaaacttcttggtgatgtttgcattcaaatcccagagttgaaccttcctttgatagttcaggtttgaaacactctttctgtaggatctgcaagtggctatttggaccactctgtggccttcgttcgaaacgggtatatcttcgcataaaatctagacagaagcattctcagaaaatactttgtgatgattgagtttaaatcacagagctgaacattcctttggatggagcaggtttgagacacactttttgtagaatctacaagtggatatttggacctctctgaggatttcgttggaaacgggataactgcacctaactaaacggaagcattctcagaaactgctttgtgatgattgcattcacctcacagagttgaacattcctattgatagagcagtttggaaacactcttgttgtggaatgtgcaagtggagatttggagcgctttgaggcctacggtagtaaagggaatagcttcatagaaaaactagacagatgcattctcaggaactttttggtgatgtttgtattcaactcccagagttgaactttcctttggaaagagcagctatgaaacactctttttctagaatctgcaagtggacgtttggagggctttgtggtttgtggtggaaaaggaaatatcttcacctaaatactagatagaagcattctcagaagcttctctgtgatgactgcattcaactcacggagttgaacactccttttgagagcgcagttttgaaactctctttctgtggcatctgcaaggggacatgtagacctctttgaagatttcgttggaaacggaatcatcttcacataaaaactatacagaagcagtctcagaatcttctttgtgatgtttgcattcaaatcccagagttgaactttcctttcaaagttcacgtttgaaacactctttttgcaggatctacaagtggatatttggaccactctgtgtccttcgttcgaaacgggtatatcttcacacgacatctagacagaagctttctcagaaaattctttgggatgattgagttgagcaaacagagctgaacactccttgcgatgtagcagtttagaaacaccctttctgcagaatctgcaagtgcatatgtggacctctctgaggaattcgttggaaacgggataatttcagctgactaaacagaagcattctcagaaccttcttcgtgatgtctgcattcaactcacagtgtggaacctttctttgatagttcaggtttgaaacactctttttgtagaaactgcaaggggataattgcacttctttgaggcctaccgtagtaaaggaaataacttcctatagaaagaagacagaagaattctcagagccctcttcgtgatgtttgcattcaactcacagtgctgaacctttctttgatagtgcagctttgaaacactctttttgtagaaactgcaagtggatgtttggtcctctctgaggatttcgttggaaacgggataaaccgcacagaactaaaacagaagcattctcagaaccttcttcgtgatgtttgcattcaactcacagtgttgaacctttctttgatagttcaggtttgaaacggtctttctgtagaaactgcaagtagatatttggacctctctgaggatttcgttggaaacgggataaaccgcacagaactaaaacagaagcattcacagaaaactcttggtgacgactgagtttaactcacagagctgaacattcctttggatggagcagtttcgaaacacactatttgtagaatgtgcaagtggatatttaggcctctctgaggatttcgttggaaacgggataaaccgcacagaactaaacagaagcattctcagaaactactttgtgatgattgcattcaagtcacagagttgaacattccctttgacagagcagtttggaaactctctttgtgtagaatctgcaagtggagatatggaccgctttgaggcctatggtagtaaaggaaatagcttcatataaaagctagacagtagcattctcagaaacttctttgtgatgcttgcattcaactcacagagttgaactttcctttcgagagagaagctttgaaacactctttttccagaatctgcaagtggacatttggagggctttgaggcctgtggtggaaaaggaattatcttcccgtaaaagctagatagaagcattgtcagaaacttctttgtgatgattgcattcaactcacagagttgaaggttccttttcaaacagcagtttccaatcactctttctgtggaatctgcaagtggatatttcgacctctttgaagatttcgttggaaacgggagaatcttcacagaaaagctaaacagaagcattctcagaaacctctctgtgatgtttgtgttcaactcccagagtttcacgttgcttttcatagagtagttctgaaacatgcttttcgtagtgtctgcaagtggacatttggagcgctttcaggcctgtggtggaaaacgaattatggtcacataaaaactggagagaagccttctcagaaacttctctgtgatgattgcattcaactcacagagttgaaccctcctatggatagagcagtgttgaaactctctttttgtggaatctgcaagtggatatgtggacctctccgaagatgtctttggaaacgggaatatcttcacataaaaactaaacagaagcattctcagaaacttcttggtgatgtttgcattcaaatcccagcgttgaaccttcctttgatagttcaggtttgaaacactctttttgtaggatctgcaagtggctatttggaccactctgtggccttcgttcgaaacgggtatatcttcgcataaaatctagacagaagcattctcagaaaatactttgtgatgattgagtttaaatcacagagctgaccattcctttggatggagcaggtttgagacacactttttgtagaatctacaagtggatatttggacctctctgaggatttcgttggaaacgggataactgcacctaactaaacggaagcattctcagaaactgctttgtgatgattgcattcacctcacagagttgaacattcctattgatagagcagtttggaaacactcttgttgtggaatgtgcaagtggagatttggagcgctttgaggcctatggtagtaaagggaatagcttcatagaaaaactagacagatgcattctcaggaactttttggtgatgtttgtattcaactcccagagttgaactttcctttggaaagagcagctatgaaacactctttttctagaatctgcaagtggacgtttggagggctttgtggtttgtggtggaaaaggaaatatcttcacctaaatactagatagaagcattctcagaagcttctctgtgatgactgcattcaactcacggagttgaacactccttttgagagcgcagttttgaaactctctttctgtggcatctgcaaggggacatgtagacctctttgaagatttcgttggaaacggaatcatcttcacataaaaactatacagaagcagtctcagaatcttctttgtgatgtttgcattcaaatcccagagttgaactttcctttcaaagttcacgtttgaaacactctttttgcaggatctacaagtggatatttggaccactctgtgtccttcgttcgaaacgggtatatcttcacacgacatctagacagaagctttctcagaaaattctttgggatgattgagtggaactcacagagctgaacattccttgcgatgtagcagtttagaaacacactttctgcagaatctgcaagtgcatatttggacctctctgaggaattcgttggaaacgggataatttcagctgactaaacagaagcattctcagaaccttcttcgtgatgtctgcattcaactcacagtgtggaacctttctttgatagttcaggtttgaaacactctttttgtagaaactgcaaggggataattgcacttctttgaggcctaccgtagtaaaggaaataacttcctatagaaagaagacagaagcattctcagaaccctcttcgtgatgtttgcattcaactcacagtgctgaacctttctttgatagttcagctttgaaacactcttcttgtagaaactgcaagtggatatttggtcctctctgaggatttcgttggaaacgggataaaccgcacagaactaaacagaagcattctcagaaccttcttcgtgatgtttgcattcaactcacagtgttgaacctttctttgatagttcaggtttgaaacggtctttctgtagaaactgcaagtagatatttggacctctctgaggatttcgttggaaacgggataaaccgcacagaactaaaacagaagcattcacagaaaactcttggtgacgactgagtttaactcacagagctgaacattcctttggatggagcagtttcgaaacacactatttgtagaatctgcaagtggatatttgggcctctctgaggatttcgatggaaacgggataaaccgcacagaactaaaacagaagcattctcagaaactacttcgtgatgattgcattcaagtcacagagttgaacattccctttgacagagcagtttggaaactctctttgtgtagaatctgcaagtggagatatggaccgctttgaggactatggtagtaaaggaaatagcttcatataaaagctaaacagtagcattctcagaaacttctttgtgatgcttgcattcaactcacagagttgaaatttcctttcgagagagaagctttgaaacactctttttccagaatctgcaagtggacatttggagggctttgaggcctgtggtggaaaaggaattatcttcccgtaaaagctagatagaagcattgtcagaaacttctttgtgatgattgcattcaactcacagagttgaaggttccttttcaaacagcagtttccaatcactctttctgtggaatctgcaagtggatatttggacctattttgaagatttcgttggaaacgggagaatcttcacagaaaagctaaacagaagcattctcagaaacttctctgtgatgtttgtgttcaactcccagagtttcacgttgcttttcatagagtagttctgaaacatgcttttcgtagtgtctgcaagtggacatttggagcgctttcaggcctgtggtggaaaacgaattatggtcacataaaaactggagagaagccttctcagaaacttctctgtgatgattgcattcaactcacagatttgaaccctcctatggatagagcattgttgaaactctctttttgtggaatctgcaagtggatatgtggacctctccgaagatgtctttggaaacgggaatatcttcacataaaaactaaacagaagcattctcagaaacttcttggtgatgtttgcattcaaatcccagagttgaaccttcctttgatagttcaggtttgaaacactctttctgtaggatctgcaagtggctatttggaccactctgtggccttcgttcgaaacgggtatatcttcgcataaaatctagacagaagcattctcagaaaatactttgtgatgattgagtttaaatcacagagctgaccattcctttggatggagcaggtttgagacacactttttgtagaatctacaagtggatatttggacctctctgaggatttcgttggaaacgggataactgcacctaactaaacggaagcattctcagaaactgctttgtgatgattgcattcacctcacagagttgaacattcctattgatagagcagtttggaaacactcttgttgtggaatgtgcaagtggagatttggagcgctttgaggcctatggtagtaaagggaatagcttcatagaaaaactagacagatgcattctcaggaactttttggtgatgtttgtattcaactcccagagttgaactttcctttggaaagagcagctatgaaacactctttttctagaatctgcaagtggacgtttggagggctttgtggtttgtggtggaaaaggaaatatcttcacctaaatactagatagaagcattctcagaagcttctctgtgatgactgcattcaactcacggagttgaacactccttttgagagcgcagttttgaaactctctttctgtggcatctgtaaggggacatgtagacctctttgaagatttcgttggaaacggaatcatcttcacataaaaactatacagaagcagtctcagaatcttctttgtgatgtttgcattcaaatcccagagttgaactttcctttcaaagttcacgtttgaaacactctttttgcaggatctacaagtggatatttggaccactctgtgtccttcgttcgaaacgggtatatcttcacaggacatctagacagaagctttctcagaaaattctttgggatgattgagtggaactcacagagctgaacattccttgcgatgtagcagtttagaaacacactttctgcagaatctgcaagtgcatatttggacctctctgaggaattcgttggaaacgggataatttcagctgactaaacagaagcattctcagaaccttcttcgtgatgtctgcattcaactcacagtgtggaacctttctttgatagttcaggtttgaaacactctttttgtagaaactgcaaggggataattgcacttctttgaggcctaccgtagtaaaggaaataacttcctatagaaagaagacagaagcattctcagaaccctcttcgtgatgtttgcattcaactcacagtgctgaacctttctttgatagttcagctttgaaacactcttcttgtagaaactgcaagtggatatttggtcctctctgaggatttcgttggaaacgggataaaccgcacagaactaaacagaagcattctcagaaccttcttcgtgatgtttgcattcaactcacagtgttgaacctttctttgatagttcaggtttgaaacggtctttctgtagaaactgcaagtagatatttggacctctctgaggatttcgttggaaacgggataaaccgcacagaactaaaacagaagcattcacagaaaactcttggtgacgactgagtttaactcacagagctgaacattcctttggatggagcagtttcgaaacacactatttgtagaatctgcaagtggatatttgggcctctctgaggatttcgttggaaacgggataaaacgcacagaactaaaacagaagcattctcagaaactactttgtgatgattgcattcaagtcacagagttgaacattccctttgacagagcagtttggaaactctctttgtgtagaatctgcaagtggagatatggaccgctttgaggcctatggtagtaaaggaaatagcttcatataaaagctagacagtagcattctcagaaacttctttgtgatgcttgcattcaactcacagagttgaactttcctttcgagagagaagctttgaaacactctttttccagaatctgcaagtggacatttggagggctttgaggcctgtggtggaaaaggaattatcttcccgtaaaagctagatagaagcattgtcagaaacttctttgtgatgattgcattgaactcgcagagttgaaggttccttttcaaacagcagtttccaatcactctttctgtggaatctgcaagtggatatttcgacctctttgaacatttcgttggaaacgggagaaccttcacagaaaagctaaacagaagcattctcagaaacttctctgtgatgtttgtgttcaactcccagagtttcacgttgcttttcatagagtagttctgaaacatgcttttcgtagtgtctgcaagtggacatttggagcgctttcaggcctgtggtggaaaacgaattatggtcacataaaaactggagagaagccttctcagaaacttctctgtgatgattgcattcaactcacagagttgaaccctcctatggatagagcagtgttgaaactctctttttgtggaatctgcaagtggatatgtggacctctccgaagatgtctttggaaacgggaatatcttcacataaaaactaaacagaagcattctcagaaacttcttggtgatgtttgcattcaaatcccagagttgaaccttcctttgatagttcaggtttgaaacactctttctgtaggatctgcaagtggctatttggaccactctgtggccttcgttcgaaacgggtatatcttcgcataaaatctagacagaagcattctcagaaaatactttgtgatgattgagtttaaatcacagagctgaccattcctttggatggagcaggtttgagacacactttttgtagaatctacaagtggatatttggacctctctgaggatttcgttggaaacgggataactgcacctaactaaacggaagcattctcagaaactgctttgtgatgattgcattcacctcacagagttgaacattcctattgatagagcagtttggaaacactcttgttgtggaatgtgcaagtggagatttggagcgctttgaggcctatgttagtaaagggaatagcttcatagaaaaactagacagatgcattctcaggaactttttggtgatgtttgtattcaactcccagagttgaactttcctttggaaagagcagctatgaaacactctttttctagaatctgcaagtggacgtttggagggctttgtggtttgtggtggaaaaggaaatatcttcacctaaatactagatagaagcattctcagaagcttctctgtgatgactgcattcaactcagggagttgaacactccttttgagagcgcagttttgaaactctctttctgtggcatctgcaaggggacatgtagacctctttgaagatttcgttggaaacggaatcatcttcacataaaaactatacagaagcagtctcagaatcttctttgtgatgtttgcattcaaatcccagagttgaactttcctttcaaagttcacgtttgaaacactctttttgcaggatctacaagtggatatttggaccactctgtgtccttcgttcgaaacgggtatatcttcacatgacatctagacagaagctttctcagaaaattctttgggttgattgagttgaactcacagagctgaacattccttgcgatgtagcagtttagaaacacactttctgcagaatctgcaagtgcatatttggacctctctgaggaattcgttggaaacgggataatttcagctgactaaacagaagcattctcagaaccttcttcgtgatgtctgcattcaactcacagtgtggaacctttctttgatagttcaggtttgaaacactctttttgtagaaactgcaaggggataattgcacttctttgaggcctaccgtagtaaaggaaataacttcctatagaaagaagacagaagcattctcagaaccctcttcgtgatgtttgcattcaactcacagtgctgaacctttctttgatagttcagctttgaaacactcttcttgtagaaactgcaagtggatatttggtcctctctgaggatttcgttggaaacgggataaaccgcacagaactaaacagaagcattctcagaaccttcttcgtgatgtttgcattcaactcacagtgttgaacctttctttcatagttcaggtttgaaacggtctttctgtagaaactgcaagtagatatttggacctctctgaggatttcgttggaaacgggatgaaccgcacagaactaaaacagaagcattcacagaaaactcttggtgacgactgagtttaactcacagagctgaacattcctttggatggagcagtttcgaaacacactatttgtagaatgtgcaagtggatatttgggcctctctgaggatttcgttggaaacgggataaaccgcacagaactaaacagaagcattctcagaaactacttcgtgatgattgcattcaagtcacagagttgaacattccctttgacagagcagtttggaaactctctttgtgtagaatctgcaagtggagatatggaccgctttgaggactatggtagtaaaggaaatagcttcatataaaagctaaacagtagcattctcagaaacttctttgtgatgcttgcattcaactcacagagttgaactttcctttcgagagagaagctttgaaacactctttttccagaatctgcaagtggacatttggagggctttgaggcctgtggtggaaaaggaattatcttcccgtaaaagctagatagaagcattgtcagaaacttctttgtgatgattgcattcaactcacagagttgaaggttccttttcaaacagcagtttccaatcactctttctgtggaatctgcaagtggatatttgggcctctctgaggatttcgttggaaacgggataaaacgcacagaactaaaacagaagcattctcagaaacttctctgtgatgtttgtgttcaactcccagactttcacattgcttttcatagagtagttctgaaacatgcttttcgtagtgtctacaagtggacatttggagcgcttccagtcctgtggtggaaaacgaattatggtcacataaaaactggagagaagccttctcagaaacttctctgtgatgattgcattcaactcacagagttgaaccctcctatggatagagcagtgttgaaactctctttttgtggaatctgcaagcggatatgtggacctctccgaagatgtctttggcaacgggaatatcttcacataaaaactaaacagaagcattctcagaaacttcttcgtgatgtttgcattcaaatcccagagttgaaccttcctttgagagttcaggtttgaaacactctttttgtaggatctgcaagtggatatttggaccactctgtggccttcgttcgaaacgggtacatcttcgcataaaatctagacagaagcattctcagaaaatactttttgatgactgagttgaactcacagagctgaacattcctttggatggagcaggtttgagacacactttttgtagaatctacaagtggatatttggacctctctgaggatttcgttggaaacgggataactgcacctaactaaacggaagcattctcagaaactgctttgtcatgattgcattcacctcacagagttgaacattcctattgatagagcagtttggaaacactcttgttgtggaatgtgcaagtggagatttggagcgctttgaggcctatggtagtaaagggaatagcttcatagaaaaactagacagatgcattctcaggaactttttggtgatgtttgtattcaactcccagagttgaactttcctttggaaagagcagctatgaaacactctttttctagaatctgcaagtggacgtttgtagggctttgtggtttgtggtggaaaaggaaatatcttcacctaaatactagatagaagcattctcagaagcttctctgtgatgactgcattcaactcacggagttgaacactccttttgagagcgcagttttgaaactctctttctgtggcatctgcaaggggacatgtagacctctttgaagatttcgttggaaacggaatcatcttcacataaaaactatacagaagcagtctcagaatcttctttgtgatgtttgcattcaaatccccgagttgaactttcctttcaaagttcacgtttgaaacactctttttgcaggatctacaagtggatatttggaccactctgtgtccttcgttcgaaacgggtatatcttcacatgacatctagacagaagctttctcagaaaattctttgggatgattgagtggaactcacagagctgaacattccttgcgatggagcagtttagaaacacactttctgcagaatctgcaagtgcatatttggacctctctgaggaattcgttggaaacgggataatttcagctgactaaacagaagcattctcagaaccttcttcgtgatgtctgcattcaactcacagtgtggaacctttctttgatagttcaggtttgaaacactctttttgtagaaactgcaaggggataattgcacttctttgaggcctaccgtagtaaaggaaataacttcctatagaaagaagacagaagcattctcagaaccttcttcgtgatgtttgcattcaactcacagtgctgaacctttctttgatagttcagttttgaaacactctttttgtagaaactgcaagtggatatttggtgctctctgaggatttcgttggaaacgggataaaccgcacagaactaaacagaagcattcacagaaaactcttggtgacgactgagtttaactcacagagctgaacattcctttggatggagcagtttcgaaacacactctttgtagaatctgcaagtggatatttggacctctctgaggatttcgttggaaacgggataaaccgcacagaactaaaacagaagcattcacagaaaactcttggtgacgactgagtttaactcacagagctgaacattcctttggatggagcagtttcgaaacacactatttgtagaatgtgcaagtggatatttaggcctctctgaggatttcgttggaaacgggataaaccgcacagaactaaacagaaagcattctcagaaactattttgtgatgattgcattcaagtcacagagttgaacattccctttgacagagcagtttggaaactctctttgtgtagaatctgcaagtggagatatggaccgctttgaggcctatggtagtaaaggaaatagcttcatataaaagctagacagagcattctcagaaacttctttgtgatgcttgcattcaactcacagagttgaactttcctttcgagagagaagctttgaaacactctttttccagaatctgcaagtggatatttggagggctttgaggcctgtggtggaaaaggaattatcttcccgtaaaagctagatagaagcattgtcagaaacttctttgtgatgattgcattcaactcacagagttgaaggttccttttcaaagagcagtttccaatcactctttctgtggaatctgcaagtggatatttggacctattttgaagatttcgttggaaacgggagaatcttcacaggaaagctaaacagaagcattctcagaaacttctctgtgatgtttgtgttcaactcccagagtttcacattgcttttcatagagtagttctgaaacatgcttttcgtagtgtctacaagtggacatttggagcgctttcaggcctgtggtggaaaacgaattatggtcacataaaaactggagagaagccttctcagaaacttctctgtgatgattgcattcaactcacagagttgaaccctcctatggatagagcagtgttgaaactctctttttgtggaatctgcaagtggatatgtggacctctccgaagatgtctttggaaacgggaatatcttcacataaaaactaaacagaagcattctcagaaacttcttggtgatgtttgcattcaaatcccagagttgaaccttcctttgatagttcaggtttgaaacactctttctgtaggatctgcaagtggctatttggaccactctgtggccttcgttcgaaacgggtatatcttcgcataaaatctagacagaagcattctcagaaaatactttgtgatgattgagtttaaatcacagagctgaccattcctttggatggagcaggtttgagacacactttttgtagaatctacaagtggatatttggacctctctgaggatttcgttggaaacgggataactgcacctaactaaacggaagcattctcagaaactgctttgtgatgattgcattcacctcacagagttgaacattcctattgatagagcagtttggaaacactcttgttgtggaatgtgcaagtggagatttggagcgctttgaggcctatggtagtaaagggaatagcttcatagaaaaactagacagatgcattctcaggaactttttggtgatgtttgtattcaactcccagagttgaactttcctttggaaagagcagctatgaaacactctttttctagaatctgcaagtggacgtttggagggctttgtggtttgtggtggaaaaggaaatatcttcacctaaatactagatagaagcattctcagaagcttctctgtgatgactgcattcaactcacggagttgaacactccttttgagagcgcagttttgaaactctctttctgtggcatctgcaaggggacatgtagacctctttgaagatttcgttggaaacggaatcatcttcacataaaaactatacagaagcagtctcagaatcttctttgtggtgtttgcattcaaatcccagagttgaactttcctttcaaagttcacgtttgaaacactctttttgcaggatctacaagtggatatttggaccactctgtgtccttcgttcgaaacgggtatatcttcacatgacatctagacagaagctttctcagaaaattctttgggatgattgagttgaactcagagagctgaacattccttgcgatgtagcagtttagaaacacactttctgcagaatctgcaagtgcatatttggacctctctgaggaattcgttggaaacgggataatttcagctgactaaaccgaagcattctcagaaccttcttcgtgatgtctgcattcaactcacagtgtggaacctttctttgatagttcaggtttgaaacactctttttgtagaaactgcaaggggataattgcacttctttgaggcctaccgtagtaaaggaaataacttcctataaaaagaagacagaagcattctcagaaccctcttcgtgatgtttgcattcaactcacagtgctgaacctttctttgatagttcagctttgaaacactcttcttgtagaaactgcaagtggatatttggtcctctctgaggatttcgttggaaacgggataaaccgcacagaactaaacagaagcattctcagaaccttcttcgtgatgtttgcattcaaatcacagtgttgaacctttctttgatagttcaggtttgaaacggtctttctgtagaaactgcaagtagatatttggacctctctgaggatttcgttggaaacgggataaaccgcacagaactaaaacagaagcattcagagaaaactcttggtgacgactgagtttaactcacagagctgaacatttcctttggatggagcagtttcgaaacacactatttgtagaatgtgcaagtggatatgtgggcctctctgaggatttcgttggaaacgggataaaccgcacagaactaaacggaagcattctcagaaactactttgtgatgattgcattcaagtcacagagttgaacattccctttgacagagcagtttggaaactctctttgtgtagaatctgcaagtggagatatggaccgctttgaggcctatggtagtaaaggaaatagcttcatataaaagctagacagtagcattctcagaaacttcattgtgatgcttgcattcaactcacagagttgaactttcctttcgagagagaagctttgaaacactctttttccagaatcttcaagtggacatttggagggctttgaggcctgtggtggaaaaggaattatcttcccgtaaaagctagatagaagcattgtcagaaacttctttgtgatgattgcattcaactcacagagttgaaggttccttttcaaacagcagtttccaatcactctttctgtggaatctgcaagtggatatttgggcctctctgaggatttcgttggaaacgggataaaacgcacagaactaaaacagaagcattctcagaaacttctctgtgatgtttgtgttcaactcccagagtttcacattgcttttcatagagtagttctgaaacatgcttttcgtagtgtctacaagtggacatttggagcgctttcaggcctgtggtggaaaacgaattatggtcacataaaaactggagagaagccttctcagaaacttctctgtgatgattgcattcaactcacagagttgaaccctcctatgggtagagcagtgttgaaactctctttttgtggaatctgcaagtggatatgtggacctctccgaagatgtctttggaaacgggaatatcttcacataaaaactaaacagaagcattctcagaaacttcttggtgatgtttgcattcaaatcccagagttgaaccttcctttgatagttcaggtttgaaacactctttctgtaggatctgcaagtggctatttggaccactctgtggccttcgttcgaaacgggtatatcttcgcataaaatctagacagaagcattctcagaaaatactttgtgatgattgagtttaaatcacagagctgaccattcctttggatggagcaggtttgagacacactttttgtagaatctacaagtggatatttggacctctctgaggatttcgttggaaacgggataactgcacctaactaaacggaagcattctcagaaactgctttgtgatgattgcattcacctcacagagttgaacattcctattgatagagcagtttggaaacactcttgttgtggaatgtgcaagtggagatttggagcgctttgaggcctatggtagtaaagggaatagcttcatagaaaaactagacagatgcattctcaggaactttttggtgatgtttgtattcaactcccagagttgaactttcctttggaaagagcagctatgaaacactctttttctagaatctgcaagtggacgtttggagggctttgtggtttgtggtggaaaaggaaatatcttcacctaaatactagatagaagcattctcagaagcttctctgtgatgactgcattcaactcacggagttgaacactccttttgagagcgcagttttgaaactctctttctgtggcatctgcaaggggacatgtagacctctttgaagatttcgttggaaacggaatcatcttcacataaaaactatacagaagcagtctcagaatcttctttgtgatgtttgcattcaaatcccagagttgaactttcctttcaaagttcacgtttgaaacactctttttgcaggatctacaagtggatatttggaccactctgtgtccttcgttcgaaacgggtatatcttcacacgacatctagacagaagctttctcagaaaattctttgggatgattgagtggaactcacagagctgaacattccttgcgatgtagcagtttagaaacacactttctgcagaatctgcaagtgcatatttggacctctctgaggaattcgttggaaacgggataatttcagctgactaaacagaagcattctcagaaccttcttcgtgatgtctgcattcaactcacagtgtggaacctttctttgatagttcaggtttgaaacactctttttgtagaaactgcaaggggataattgcacttctttgaggcctaccgtagtaaaggaaataacttcctatagaaagaagacagaagaattctcagagccctcttcgtgatgtttgcattcaactcacagtgctgaacctttctttgatagtgcagcttcgaaacactctttttgtagaaactgcaagtggatgtttggtcctctctgaggatttcgttggaaacgggataaaccgcacagaactaaaacagaagcattctcagaaccttcttcgtgatgtttgcattcaactcacagtgttgaacctttctttgatagttcaggtttgaaacggtctttctgtagaaactgcaagtagatatttggacctctctgaggatttcgttggaaacgggataacccgcacagaactaaaacagaagcattcacagaaaactcttggtgacgactgagtttaactcacagagctgaacattcctttggatggagcagtttcgaaacacactatttgtagaatctgcaagtggatatttgggcctctctgaggatttcgttggaaacgggataaaacgcacagaactaaaacagaagcattctcagaaactactttgtgatgattgcattcaagtcacagagttgaacattccctttgacagagcagtttggaaactctctttgtgtagaatctgcaagtggagatatggaccgctttgaggcctatggtagtaaaggaaatagcttcatataaaagctagacagtagcattctcagaaacttctttgtgatgcttgcattcaactcacagagttgaactttcctttcgagagagaagctttgaaacactctttttccagaatgtgcaagtggacatttggggagctttgaggcctgtggtggaaaaggaattatcttcccgtaaaagctagatagaagcattgtcagaaacttctttgtgatgattgcattcaactcacagagttgaaggttccttttcaaacagcagtttccaatcactctttctgtggaatctgcaagtggatatttgggcctctctgaggatttcgttggaaacgggataaaacgcacagaactaaaacagaagcattctcagaaacttctctgtgatgtttgtgttcaactcccagagtttcacattgcttttcatagagtagttctgaaacatgcttttcgtagtgtctacaagtggacatttggagcgctttcaggcctgtggtggaaaacgaattatggtcacataaaaactggagagaagccttctcagaaacttctatgtgatgattgcattcaactcacagagttgaaccctcctatggatagagcagtgttgaaactctctttttgtggaatctgcaagtggatatgtggacctctccgaagatgtctttggcaacgggaatatcttcacataaaaactaaacagaagcattctcagaaacttcttggtgatgtttgcattcaaatcccagagttgaaccttcctttgatagttcaggtttgaaacactctttttgtaggatctgcaagtggatatttggaccactctgtggccttcgttcgaaacgggtatatcttcgcataaaatctagacagaagcattctcagaaaatactttgtgatgattgagttgaactcacagagctgaacattcctttggatggagcaggtttgagacacactttttgtagaacctacaagtggatatttggacctctctgaggatttcgttggaaacgggataactgcacctaactaaacggaagcattctcagaaactgctttgtgatgattgcattcacctcacagagttgaacattcctattgatagagcagtttggaaacactcttgttgtggaatgtgcaagtggagatttggagcgctttgaggcctatggtagtaaagggaatagcttcatagaaaaactagacagatgcattctcaggaactttttggtgatgtttgtattcaactcccagagttgaactttcctttggaaagagcagctatgaaacactctttttctagaatctgcaagtggacgtttggagggctttgtggtttgtggtggaaaaggaaatatcttcacctaaatactagatagaagcattctcagaagcttctctgtgatgactgcattcaactcacggatttgaacactccttttgagagcgcagttttgaaactctgtttctgtggcatctgcaaggggacatgtagacctctttgaagatttcgttggaaacggaatcatcttcacataaaaactatacagaagcagtctcagaatcttctttgtgatgtttgcattcaaatcccagagttgaactttcctttcaaagttcacgtttgaaacactctttttgcaggatctacaagtggatatttggaccactctgtgtccttcgtttgaaacgggtgtatcttcacatgacatctagacagaagctttctcagaaaattctttgggatgatagagtggaactcacagagctgaacattccttgcaatgtagcagtttagaaacacactttctgcagaatctgcaagtgcatatttggacctctctgaggaattcgttggaaacgggataatttcagctgactaaacagaagcattctcagaaccttcttcgtgatgtctgcattcaactcacagtgtggaaccctttctttgatagttcaggtttgaaacactctttttgtagaaactgcaaggggataattgcacttctttgaggcctaccgtagtaaaggaaataacttcctatagaaagaagacagaagcattctcagagccctcttcgtgatgtttgcattcaactcacagtgctgaacctttctttgatagtgcagctttgaaacactcttcttgtagaaactgcaagtggatatttggtcctctctgaggatttcgttggaaacgggataaaccgcacagaactaaacagaagcattcacagaaaactcttggtgacgactgagtttaactcacagagctgaacattcctttggatggagcagtttcgaaacacactatttgtagaatctgcaagtggatatttgggcctctctgaggatttcgttggaaacgggataaaacgcacagaagtaaaacagaagcattctcagaaactactttgtgatgattgcattcaagtcacagagttgaacattccgtttgacagagcagtttggaaactctctttgtgtagaatctgcaagtggagatatggaccgctttgaggcctatggtagtaaaggaaatagcttcatataaaacctagacagtagcattctcagaaacttctttgtgatgcttgcattcaactcacagagttgaactttcctttcgagagagaagctttgaaacactctttttccagaatgtgcaagtggagatttggagggctttgaggcctgtggtggaaaaggaattatcttcccgtaaaagctagatagaagcattgtcagaaacttctttgtgatgattgcatacaagtcacagagttgaaggttccttttcaaagagcagtttccaatcactctttctgtggaatctgcaagtggatatttggacctctttgaagatttcgttggaaacgggagaatcttcacagaaaagctaaacagaagcattctcagaaacttctctgtgatgtttgtgttcaactcccagagtttcacattgcttctcatagagtagttctgaaacatgcttttcgtagtgtctgcaagtggacatttggagcgctttcaggcctgtggtggaaaacgaattatggtcacataaaaactggagagaagccttctcagaaacttctctgtgatgattgcattcaactcacagagttgaaccctcctatggatagagcagtgttgaaactctctttttgtggaatctgcaagcggatatgtggacctctccgaagatgtctttggcaacgggaatatcttcacataaaaactaaacagaagcattctcagaaacttcttggtgatgtttgcattcaaatcccagagttgaaccttcctttgagagttcaggtttgaaacactctttttgtaggatctgcaagtggatatttggaccactctgtggccttcgttcgaaacgggtacatcttcgcataaaatctagacagaagcattctcagaaaatactttgtgatgattgagtttaaatcacagagctgaccattcctttggatggagcaggtttgagacacactttttgtagaatctacaagtggatatttggacctctctgaggatttcgttggaaacgggataactgcacctaactaaacggaagcattctcagaaactgctttgtgatgattgcattcacctcacagagttgaacattcctattgatagagcagtttggaaacactcttgttgcggaatgtgcaagtggagatttggagcgctttgaggcctgtggtagtaaagggaatagcttcatagaaaaactagacagatgcattctcaggaactttttggtgatgtttgtattcaactcccagagttgaactttcctttggaaagagcagctatgaaacactctttttctagaatctgcaagtggacgtttggagggctttgtggtttgtggtggaaaaggaaatatcttcacctaaatactagatagaagcattctcagaagcttctctgtgatgactgcattcaactcacggagttgaacactccttttgagagcgcagttttgaaactctctttctgtggcatctgcaaggggacatgtagacctctttgaagatttcgttggaaacggaatcatcttcacataaaaactatacagaagcagtctcagaatcttctttgtgatgtttgcattcaaatcccagagttgaactttcctttcaaagttcacgtttgaaacactctttttgcaggatctacaagtggatatttggaccactctgtgtccttcgttcgaaacgggtatatcttcacacgacatctagacagaagctttctcagaaaattctttgggatgattgagtggaactcacagagctgaacattccttgcgatgtagcagtttagaaacacactttctgcagaatctgcaagtgcatatttggacctctctgaggaattcgttggaaacgggataatttcagctgactaaacagaagcattctcagaaccttcttcgtgatgtctgcattcaactcacagtgtggaacctttctttgatagttcaggtttgaaacactctttttgtagaaactgcaaggggataattgcacttctttgaggcctaccgtagtaaaggaaataacttcctatagaaagaagacagaagaattctcagagccctcttcgtgatgtttgcattcaactcacagtgctgaacctttctttgatagtgcagctttgaaacactctttttgtagaaactgcaagtggatgtttggtcctctctgaggatttcgttggaaacgggataaaccgcacagaactaaaacagaagcattctcagaaccttcttcgtgatgtttgcattcaactcacagtgttgaacctttctttgatagttcaggtttgaaacggtctttctgcagaaactgcaagtagatatttggaccgctctgaggatttcgttggaaacgggataacccgcacagaactaaaacagaagcattcacagaaaactcttggtgacgactgagtttaactcacagagctgaacattcctttggatggagcagtttcgaaacacactatttgtagaatctgcaagtggatatttgggcctctctgaggatttcgttggaaacgggataaaccgcacagaactaaaacagaagcattctcagaaactactttgtgatgattgcattcaagtcacagagttgaacattccctttgacagagcagtttggaaactctctttgtgtagaatctgcaagtggagatatggaccgctttgaggcctatggtagtaaaggaaataccttcatataaaagctagacagtagcattctcagaaacttctttgtgatgcttgcattcaactcacagagttgaactttcctttcgagagagaagctttgaaacactctttttccagaatgtgcaagtggacatttggagggctttgaggcctgtggtggaaaaggaattatcttcccgtgaaagctagatagaagcattgtcagaaacttctttgtgatgattgcattcaactcacagagttgaaggttccttttcaaacagcagtttccaatcactctttctgtggaatctgcaagtggatatttcgacctctttgaagatttcgttggaaacgggagaacattcacagaaaagctaaacagaagcattctcagaaacttctctgtgatgtttgtgttcaactcccagagtttcacgttgcttttcatagagtagttctgaaacatgcttttcgtagtgtctgcaagtggacatttggagcgctttcaggcctgtggtggaaaacgaattatggtcacataaaaactggagagaagccttctcagaaacttctctgtgatgattgcattcaactcacagagttgaaccctcctatggatagagcagtgttgaaactctctttttgtggaatctgcaagtggatatgtggacctctccgaagatgtctttggaaacgggaatatcttcacataaaaactaaacagaagcattctcagaaacttcttggtgatgtttgcattcaaatcccagagttgaaccttcctttgatagttcaggtttgaaacactctttctgtaggatctgcaagtggctatttggaccactctgtggccttcgttcgaaacgggtatatcttcgcataaaatctagacagaagcattctcagaaaatactttgtgatgattgagtttaaatcacagagctgaacattcctttggatggagcaggtttgagacacactttttgtagaatctacaagtggatatttggacctctctgaggatttcgttggaaacgggataactgcacctaactaaacggaagcattctcagaaactgctttgtgatgattgcattcacctcacagagttgaacattcctattgatagagcagtttggaaacactcttgttgtggaatgtgcaagtggagatttggagcgctttgaggcctatggtagtaaagggaatagcttcatagaaaaactagacagatgcattctcaggaactttttggtgatgtttgtattcaactcccagagttgaactttcctttggaaagagcagctatgaaacactctttttctagaatctgcaagtggacgtttggagggctttgtggtttgtggtggaaaaggaaatatcttcacctaaatactagatagaagcattctcagaagcttctctgtgatgactgcattcaactcacggagttgaacactccttttgagagcgcagttttgaaactctctttctgtggcatctgcaaggggacatgtagacctctttgaagatttcgttggaaacggaatcatcttcacataaaaactatacagaagcagtctcagaatcttctttgtgatgtttgcattcaaatcccagagttgaactttcctttcaaagttcacgtttgaaacactctttttgcaggatctacaagtggatatttggaccactctgtgtccttcgttcgaaacgggtatatcttcacaggacatctagacagaagctttctcagaaaattctttgggatgattgagtggaactcacagagctgaacattccttgcgatgtagcagtttagaaacacactttctgcagaatctgcaagtgcatatttggacctctccgaggaattcgttggaaacgggataatttcagctgactaaacagaagcattctcagaaccttcttcgtgatgtctgcattcaactcacagtgtggaacctttctttgatagttcaggtttgaaacactctttttgtagaaactgcaaggggataattgcacttctttgaggcctaccgtagtaaaggaaataacttcctatagaaagaagacagaagcattctcagaaccctcttcgtgatgtttgcattcaactcacagtgctgaacctttctttgatagttcagctttgaaacactctttttgtagaaactgcaagtggatatttggtcctctctgagcatttcgttggaaacgggataaactgcacagaactaaacagaagcattctcagaaccttcttcgtgatgtttgcattcaactcacagtgttgaacctttctttgatagttcaggttggaaacggtctttctgtagaaactgcaagtagatatttggacctctctgaggatttcgttggaaacgggataaaccgcacagaactaaaacagaagcattcacagaaaactcttggtgacgactgagtttaactcacagagctgaacattcctttggatggagcagtttcaaaacacactatttgtagaatctgcaagtggatatgtgggcctctctgaggatttcgttggaaacgggataaaccgcacagaactaaaacagaagcattctcagaaactactttgtgatgattgcattcaagtcacagagttgaacattccctttgacagggcagtttggaaactctctttgtgtagaatctgcaagtggagatatggaccgctttgaggcctatggtagtaaaggaaatagcttcatataaaagctagacagtagcattctcagaaacttctttgtgatgcttgtattcaactcacagagttgaactttcctttcgagagagaagctttgaaacactctttttccagaatctgcaagtggacatttggagggctttgaggcctgtggtggaaaatgaattatcttcccgtataagctagatagaagcattgtcagaaacttctttgtgatgattgcattcaactcacagagttgaaggttccttttcaaacagcagtttccaatcactctttctgtggaatctgcaagtggatatttgggcctctctgaggatttcgttggaaacgggataaaacgcacagaactaaaacagaagcattctcagaaacttctctgtgatgtttgtgttcaactcccagagtttcacattgcttttcatagagtagttctgaaacatgcttttcgtagtgtctgcaagtggacatttggagcgctttcaggcctgtggtggaaaacgaattatggtcacataaaaactggagagaagccttctcagaaacttctctgtgatgattgcattcaactcacagagttgaaccctcctatggatagagcagtgttgaaactctctttttgtggaatctgcaagtggatatgtggacctctccgaagatgtctttggaaacgggaatatcttcacataaaaactaaacagaagcattctcagaaacttcttggtgatgtttgcattcaaatcccagagttgaaccttcctttgatagttcaggtttgaaacactctttctgtaggatctgcaagtggctatttggaccactctgtggccttcgttcgaaacgggtatatcttcgcataaaatctagacagaagcattctcagaaaatactttgtgatgattgagtttaaatcacagagctgaccattcctttggatggagcaggtttgagacacactttttgtagaatctacaagtggatatttggacctctctgaggatttcgttggaaacgggataactgcacctaactaaacggaagcattctcagaaactgctttgtgatgattgcattcacctcacagagttgaccattcctattgatagagcagtttggaaacactcttgttgtggaatgtgcaagtggagatttggagcgctttgaggcctatggtagtaaagggaatagcttcatagaaaaactagacagaatgcattctcaggaactttttggtgatgtttgtattcaactcccagagttgaactttcctttggaaagagcagctatgaaacactgtttttctagaatctgcaagtggacgtttggagggctttgtggtttgtggtggaaaaggaaatatcttcacctaaatactagatagaagcattctcagaagcttctctgtgatgactgcattcaactcacggagttgaacactccttttgagagcgcagttttgaaactctctttctgtggcatccgcaaggggacatgtagacctactttgaagatttcgttggaaacggaatcatcttcacataaaaactatacagaagcagtctcagaatcttctttgtgatgtttgcattcaaatcccagagttgaactttcctttcaaagttcacgtttgaaacactctttttgcaggatctacaagtggatatttggaccactctgtgtccttcgttcgaaacgggtatatcttcacatgacatctagacagaagctttctcagaaaattctttgggatgattgagttgaactcacagagctgagcattccttgcgatgtagcagtttagaaacacactttctgcagaatctgcaagtgcatatttggacctctgtgaggaattcgttggaaacgggataatttcagctgactaaacagaagcattctcagaatttcttcgtgatgtctgcattcaactcacagtgtggaacctttctttgatagttcaggtttgaaacactctttttgtagagactgcaaggggataattgcacttctttgaggcctacggtagtaaaggaaataacttcctataaaaagaagacagaagcattctcagaaccctcttcgtgatgtttgcattcaactcacagttctgaacctttctttgatagttcagctttgaaacactcttcttgtagaaactgcaagtggatatttggtcctctctgaggatttcgttggaaacgggataaaccgcacagaactaaacagaagcattctcagaaccttcttcgtgatgtttgcattcaactcacagtgttgaacctttctttgatagttcaggttggaaacggtctttctgtagaaactgcaagtagatatttggacctctctgaggatttcgttggaaacgggataaaccgcacagaactaaaacagaagcattcacagaaaactcttggtgacgacagagtttaactcacagagctgaacattcctttggatggagcagtttcgaaacacactatttgtagaatgtgcaagtggatatttgggcctctctgaggatttcgttggaaatgggatataccgcacagaactaaacagaagcattctcagaaactattttgtgatgattgcattcaagtcacagagttgaacattccctttgacagagcagtttggaaactctctttgtgtagaatctgcaagtggagatatggaccgctttgaggcctatggtagtaaaggaaatagcttcatataaaagctagacagtagcattctcagaaacttctttgtgatgcttgcattcaactcacagagttgaactttcctttcgagagagaagctttgaaacactctttttccagaatctgcaagtggacatttggagggctttgaggcctgtggtggaaaaggaattatcttccccgtaaaagctagatagaagcattgtcagaaacttctttgtgatgattgcattcaactcacagagttgaaggttccttttcaaagagcagtttccaatcactctttctgtggaatctgcaagtggatatttggacctattttgaagatttcgttggaaacgggagaatcttcacaggaaagctaaacagaagcattctcagaaacttctctgtgatgtttgtgttcaactcccagagtttcacattgcttttcatagagtagttctgaaacatgcttttcgtagtgtctacaagtggacatttggagcgctttcaggcctgtggtggaaaacgaattatggtcacataaaaactggagagaagccttctcagaaacttctctgtgatgattgcattcaactcacagagttgaaccctcctatggatagagcagtgttgaaactctctttttgtggaatctgcaagtggatatgtggacctctccgaagatgtctttggaaacgggaatatcttcacataaaaactaaacagaagcattctcagaaagttcttggtgatgtttgcattccaatcccagagttgaaccttcctttgatagttcaggtttgaaacactctttttgtaggatctgcaagtggatatttggaccactctctggccttcgttcgaaacgggtacatcttcgcataaaatctagagagaagcattctcagaaaatattttgtgatgattgagttgaactcacagagctgaacattcctttcgatggagcaggtttgaaacacactttttgtagaatctacaggtggatatttggacctctctgaagatttcgttggaaacgggataactgcacctaactaaacggaagcattctcagaaactgctttgtgatgattgcattcacctcacagagttgaacattcctattgatagagcagtttggaaacactcttgttgtggaatgtgcaagtggagatttggagcgctttgaggcctatgttagtaaagggaatagcttcatagaaaaactagacagatgcattctcaggaactttttggtgatgtttgtattcaactcccagagttgaactttcctttggaaagagcagctatgaaacactctttttctagaatctgcaagtggacgtttggagggctttgtggtttgtggtggaaaaggaaatatcttcacctaaatactagatagaaagcattctcagaagcttctctgtgatgactgcattcaactcacggagttgaacactccttttgagagcgcagttttgaaactctctttctgtggcatctgcaaggggacatgtagacctctttgaagatttcgttggaaacggaataatcttcacataaaaactatacagaagcagtctcagaatcttctttgtgatgtttgcattcaaatcccagagttgaactatcctttcaaagttcacgtttgaaacactctttttgcaggatctacaagtggatatttggaccactctgtgtccttcgttcgaaacgggtatatcttcacatgacatctagacagaagctttctcagaaaattctttgggatgattgagtggaactcacagagctgaacattccttgcgatgtagcagtttagaaacacaccttctgcagaatctgcaagtgcatatttggacctctctgaggaattcgttggaaacgggataatttcagctgactaaacagaagcattctcagaaccctcttcgtgatgtctgcattcaactcacagtgctgaacctttctttgatagttcagctttgaaacactctttttgtagaaactgcaaggggataattgcacttctttgaggcctaccgtagtaaaggaaataacttcctataaaaagaagacagaagcattctcagaaccctcttcgtgatgtttgcattcaactcacagtgctgaacctttctttgatagttcagctttgaaacactgtttttgtagaaactgcaagtggacatttggtcctctgtgaggatttcgttggtaacgggataaactgcacagaactaaacagaagcatcctcagaaccttcttcgtgatgtttgcattcaactcacagtgctgaacctttctttgatagttcagatttgaaacactctttttgtagaaactgcaagtggatatttggacctctctgaggatttcgttggaaacgggataaaccgcacagaactaaaacagaagcattcacaggaaaactcttggtgacgactgcgtttaactcacagagctgaacatccctttggatggagcagtttcgaaaaacactatttgtagaatgtgcaagtggatattggggcctctctgaggatttcgttggaaacgggataaaccacacagaactaaacagaagcattctcagaaactactttgtgatgattgcattcaagtcacagagttgaacattccctttgacagagcagtttggaaactctctttgtgtagaatctgcaagtggagatatggaccgctttgaggactatggtagtaaaggaaatagcttcatataaaagctaaacagtagcattctcagaaacttctttgtgatgcttgcattcaactcacagagttgaactttcctttcgagagagaagctttgaaacactctttttccagaatctgcaagtggacatttggagggctttgaggcctgtggtggaaaaggaattatcttcccgtaaaagctagatagaagcattgtcagaaacttctttgtgatgattgcattcaactcacagagttgaaggttccttttcaaacagcagtttccaatcactctttctgtggaatctgcaagtggatatttgggcctctctgaggatttcgttggaaacgggataaaacgcacagaactaaaacagaagcattctcagaaacttctctgtgatgtttgtgttcaactcccagagtttcacgttgcttttcatagagtagttctgaaacatgcttttcgtagtgtctgcaagtggacatttggagcgctttcaggcctgtggtggaaaacgaattatggtcacataaaaactggagagaagccttctcagaaacttctctgtgatgattgcattcaactcacagagttgaaccctcctatggatagagcagtgttgaaactctctttttgtggaatctgcaagtggatatgtggacctctccgaagatgtctttggaaacgggaatatcttcacataaaaactaaacagaagcattctcagaaacttcttggtgatgtttgcattcaaatcccagagttgaaccttcctttgatagttcaggtttgaaacactctttttgtaggatctgcaagtggatatttggaccactctgtggccttcgttcgaaacgggtacatcttcgcataaaatctagacagaagaattctcagaaaatactttgttatgattgagttgaactcacagagctgaacattcctttggatggagcaggtttgagacacactttttgtagaatctacaagtggatatttggacctctctgaggatttcgttggaaacgggataactgcacctaactaaacggaagcattctcagaaactgctttgtgatgattgcattcacctcacagagttgaacattcctattgatagagcagtttggaaacgctcttcttgtggaatgtgcaagtggagatttggagcgctttgaggcctatggtagtaaagggaatagcttcatagaaaaactagacagatgcattctcaggaaccttttggtgatgtttgtattcaactcccagagttgaactttcctttggaaagagcagctatgaaacactctttttctagaatctgcaagtggacgtttggagggctttgtggtttgtggtggaaaaggaaatatcttcacctaaatactagatagaagcattctcagaagcttctctgtgatgactgcattcaactcacggagttgaacactccttttgagagcgcagttttgaaactctctttctgtggcatctgcaaggggacatgcagacctctttgaagatttcgttggaaacggaatcatcttcacataaaaactatacagaagcagtctcagaatcttctttgtgatgtttgcattcaaatcccagagttgaactttcccttcaaagttcacgtttgaaacactctttttgcaggatctacaagtggatatttggaccactctgtgtccttctttcgaaacgggtatatcttcacacgacatctagacagaagctttctcagaaaattctttgggatgattgagtggaactcacagagctgaacattccttgcgatgtagcagtttagaaacacactttctgcagaatctgcaagtgcatatttggacctctctgaggaattcgttggaaacgggataatttcagctgactaaacagaagcattctcagaaccttcttcgtgatgtctgcattcaactcacagtgtggaaactttctttgatagttcaggtttgaaacactctttttgtagagactgcaaggggataattgcacttctttgaggcctaccgtagtaaaggaaataacttcctataaaaagaagacagaagcattctcagaaccctcttcgtgatgtttgcattcaactcacagtgctgaacctttctttgatagttcagctttgaaacactctttttgtagaaactgcaagtggatatttggtcctctctgagcatttcgttggaaacgggataaactgcacagaactaaacagaagcattctcagaaccttcttcgtgatgtttgcattcaactcacagtgttgaacctttctttgatagttcaggtttgaaacggtctttctgtagaaactgcaagtagatatttggacctctctgaggatttcgttggaaacgggataaaccgcacagaactacaacagaagcattcacagaaaactcttggtgacgactgagtttaactcacagagctgaacattcctttggatggagcagtttcgaaacacactatttgtagaatgtgcaagtggatatttaggcctctctgaggatttcgttggaaacgggataaaccgcacagaactaaacagaagcattctcagaaactactttgtgatgattgcattcaagtcacagagttgaacattccctttgacagagcagtttggaaactctctttgtgtagaatctgcaagtggagatatggaccgctttgaggcctatggtagtaaaggaaatagcttcatataaaagctagacagtagcattctcagaaacttctttgtgatgcttgcattcaactcacagagttgaactttcctttcgagagagaagctttgaaacaatctttttccagaatctgcaagtggacatttggagggctttgaggcctgtggtggaaaaggaattattgtcccgtaaaagctagatagaagcattgtcagaaacttctttgtgatgattgcattcaactcacagagttgaaggttccttttcaaacagcagtttccaatcactctttctgtggaatctgcaagtggatatttgggcctctctgaggatttcgttggaaacgggataaaacgcacagaactaaaacagaagcattctcagaaacttctctgtgatgtttgttttcaactcccagagtttcacattgcttctcatagagtagttctgaaacatgcttttcgtagtgtctgcaagtggacatttggagcgctttcaggcctgtggtggaaaacgaattatggtcacataaaaactggagagaagccttctcagaaacttctctgtgatgattgcattcaactcacagagttgaaccctcctatggatagagcagtgttgaaactctctttttgtggaatctgcaagcggatatgtggacgtctccgaagatgtctttggaaacgggaatatcttcacataaaaactaaacagaagcattctcagaaacttcttggtgatgtttgcattcaaatcccagagttgaaccttcctttgatagttcaggtttgaaacactctttctgtaggatctgcaagtggctatttggaccactctgtggccttcgttcgaaacgggtatatcttcgcataaaatctagacagaagcattctcagaaaatactttgtgatgattgagtttaaatcacagagctgaccattcctttggatggagcaggtttgagacacactttttgtagaatctacaagtggatatttggacctctctgaggatttcgttggaaacgggataactgcacctaactaaacggaagcattctcagaaactgctttgtgatgattgcattcacctcacagagttgaacattcctattgatagagcagtttggaaacactcttgttgtggaatgtgcaagtggagatttggagcgctttgaggcctatggtagtaaagggaatagcttcatagaaaaactagacagatgcattctcaggaactttttggtgatgtttgtattcaactcccagagttgaactttcctttggaaagagcagctatgaaacactctttttctagaatctgcaagtggacgtttggagggctttgtggtttgtggtggaaaaggaaatatcttcacctaaatactagatagaagcattctcagacgcttctctgtgatgactgcattcaactcacggagttgaacactccttttgagagcgcagttttgaaactctctttctgtggcatctgcaaggggacatgtagacctctttgaagatttcgttggaaacggaatcatcttcacataaaaactatatagaagcagtctcagaatcttctttgtgatgtttgcattcaaatcccagagttgaactttcctttcaaagttcacgtttgaaacactctttttgcaggatctacaagtggatatttggaccactctgtgtccttcgttcgaaacgggtatatcttcacacgacatctagacagaagctttctcagaaaattctttgggatgattgagttgaactcacagagctgagcattccttgcgatgtagcagtttagaaacacactttctgcagaatctgcaagtgcatatttggacctctgtgaggaattcgttggaaacgggataatttcagctgactaaacagaagcattctcagaaccttcttcgtgatgtctgcattcaactcacagtgtggaacctttctttgatagctcaggtttgaaacactctttttgtagaaactgcaaggggataattgcacttctttgaggcctaccgtagtaaaggaaataacttcctatagaaagaagacagaagcattctcagaaccctcttcgtgatgtttgcattcaactcacagtgctgaacctttctttgatagttcagctttgaaacactcttcttgtagaaactgcaagtggatatttggtcctctctgaggatttcgttggaaacgggataaaccgcacagaactaaacagaagcattctcagaaccttcttcgtgatgtttgcattcaactcacagtgttgaacctttctttgatagttcaggtttgaaacggtctttctgtagaaactgcaagtagatatttggacctctctgaggatttcgttggaaacgggataacccgcacagaactaaaacagaagcattcacagaaaactcttggtgacgactgagtttaactcacagagctgaacattcctttggatggagcagtttcgaaacacactatttgtagaatgtgcaagtggatatttaggcctctctgaggatttcgttggaaacgggataaaccgcacagaactaaacagaagcattctcagaaactactttgtgatgattgcattcaagtcacagagttgaacattccctttgacagagaagtttggaaactctctttgtgtagaatctgcaagtggagatatggaccgctttgaggcctatggtagtaaaggaaatagcttcatataaaagctagacagtagcattctcagaaaacttctttgtgatgcttgcattcaactcacagagttgaactttcctttcgagagagaagctttgaaacactctttttccagaatgtgcaagtggacatttggggagctttgaggcctgtggtggaaaaggaattatcttcccgtaaaagctagatagaagcattgtcagaaacttctttgtgatgattgcattcaactcacagagttgaaggttccttttcaaacagcagtttccaatcactctttctgtggaatctgcaagtggatatttcgacctctttgaagatttcgttggaaacgggagaatcttcacagaaaagctaaacagaagcattctcagaaccttctctgtgatgtttgtgttcaactcccagagtttcacattgcttttcatagagtagttctgaaacatgcttttcgtagtgtctgcaagtggacgtttggagcgctttcaggcctgtggtggaaaacgaattatggtcacataaaaactggagagaagccttctcagaaacttctctgtgatgattgcattcaactcacagagttgaacactcctatggatagagcagtgttgaaactctctttttgtggaatctgcaagtggatatgtggacctctccgaagatgtctttggaaacgggaatatcttcacataaaaactaaacagaagcattctcagaaacttcttggtgatgtttgcattcaaatcccagagttgaaccttcctttgatagttcaggtttgaaacactctttctgtaggatctgcaagtggctatttggaccactctgtggccttcgttcgaaacgggtatatcttcgcataaaatctagacagaagcattctcagaaaatactttgtgatgattgagtttaaatcacagagctgaccattcctttggatggagcaggtttgagacacactttttgtagaatctacaagtggatatttggacctctctgaggatttcgttggaaacgggataactgcacctaactaaacggaagcattctcagaaactgctttgtgatgattgcattcacctcacagagttgaacattcctattgatagagcagtttggaaacactcttgttgtggaatgtgcaagtggagatttggagcgctttgaggcctatggtagtaaagggaatagcttcatagaaaaactagacagatgcattctcaggaactttttggtgatgtttgtattcaactcccagagttgaactttcctttggaaagagcagctatgaaacactctttttctagaatctgcaagtggacgtttggagggctttgtggtttgtggtggaaaaggaaatatcttcacctaaatactagatagaagcattctcagaagcttctctgtgatgactgcattcaactcacggagttgaacactccttttgagagcgcagttttgaaactctctttctgtggcatccgcaaggggacatgtagacctctttgaagatttcgttggaaacggaatcatcttcacataaaaactatacagacagtctcaggaatcttctttgtgatgtttgcattcaaatcccagagttgaactttcctttcaaagttcacgtttgaaacactctttttgcaggatctacaagtggatatttggaccactctgtgtccttcgttcgaaacgggtatatcttcacatgacagctagacagaagctttctcagaaaattctttgggatgattgagtggaactcacagtgctgaacattccttgcgatgtagcagtttagaaacacactttctgcagaatctgcaagtgcatatttggacctctctgaggaattcgttggaaacgggataatttcagctgactaaacagaagcattctcagaaccttcttcgtgatgtctgcattcaactcacagtgtggaacctttctttgatagttcaggtttgaaacactctttttgtagaaactgcaaggggataattgcacttctttgaggcctaccgtagtaaaggaaataacttcctattgaaagaagacagaagcattctcagaaccttcttcgtgatgtttgcattcaactcacagtgttgaacctttctttgatagttcaggtttgaaacggtctttctgtagaaactgcaagtagatatttggacctctctgaggatttcgttggaaacgggataaaccgcacagaactaaacagaagcattcacagaaaactcttggtgacgactgagtttaactcacagagctgaacattcctttggatggagcagtttcgaaacacactatttgtagaatgtgcaagtggatatttgggcctctctgaggatttcgttggaaacgggataaaccgcacagaactaaacagaagcattctcagaaactactttgtgatgattgcattcaagtcacagagttgaacattccctttgacagagcagtttggaaactctctttgtgtagaatctgcaagtggagatatggaccgctttgaggcctatggtagtaaaggaaatagcttcatataaaagctagacagtagcattctcagaaacttctttgtgatgcttgcattcaactcacagagttgaactttcctttcgagagagaagctttgaaacactctttttccagaatctgcaagtggacatttggagggctttgaggcctgtggtggaaaaggaattatcttcccgtaaaagctagatagaagcattgtcagaaacttctttgtgatgattgcattcaactcacagagttgaaggttccttttcaaagagcagtttccaatcactctttgtgtggaatctgcaagtggatatttggacctattttgaagatttcgttggaaacgggagaatcttcacaggaaagctaaacagaagcattctcagaaacttctctgtgatgtttgtgttcaactcccagagtttcacgttgcttttcatagagtagttctgaaacatgcttttcgtagtgtctgcaagtggacatttggagcgctttcaggcctgtggtggaaaacgaattatggtcacaaaaaaactggagagaagccttctcagaaacttctctgtgatgattgcattcaactcacagagttgaaccctcctatggatagagcagtgttgaaactctctttttgtggaatctgcaagtggatatgtggacctctccgaagatgtctttggaaacgggaatatcttcacataaaaactaaacagaagcattctcagaaacttcttggtgatgtttgcattcaaatcccagagttgaaccttcctttgatagttcaggtttgaaacactctttctgtaggatctgcaagtggctatttggaccactctgtggccttcgttcgaaacgggtatatcttcgcataaaatctagacagaagcattctcagaaaatactttgtgatgattgagtttaactcacagatctgaacattcctttggatggagcaggtttgagacacactttttgtagaatctacaagtggatatttggacctctctgaggatttcgttggaaacctgataactgcacctaactaaacggaagcattctcagaaactgctttgtgatgattgcattcacctcacagagttgaacattcctattgatagagcagtttggaaacactcttgttgtggaatgtgcaagtggagatttggagcgctttgaggcctgtggtagtaaagggaatagcttcatagaaaaactagacagatgcattctcaggaaccttttggtgatgtttgtattcaactcccagagttgaactttcctttggaaagagcagctatgaaacactctttttctagaatctgcaagtggacgtttggagggctttgtggtttgtggtggaaaaggaaatatcttcacctaaatactagatagaagcattctcagaagcttctctgtgatgactgcattcaactcacggagttgaacactccttttgagagcgcagttttgaaactctctttctgtggcatctgcaaggggacatgtagacctctttgaagatttcgttggaaacggaatcatcttcacataaaaactatacagaagcagtctcagaatcttctttgtgatgtttgcattcaaatcccagagttgaactttcctttcaaagttcacgtttgaaacactctttttgcaggatctactagtggatatttggaccactctgtgtccttcgttcgaaacgggtatatcttcacatgacatctagacagaagctttctcagaaaattctttgggatgattgagttgagcaaacagagctgaacactccttgcgatgtagcagtttagaaacacactttctgcagaatctgcaagtgcatatgtggacctctctgaggaattcgttggaaacgggataatttcagctgacaaaacagaagcattctcagaaccttcttcgtgatgtctgcattcaactcacagtgtggaacctttctttgatagttcaggtttgaaacactctttttgtagaaactgcaaggggataattgcactctttgaggagtaccgtagtaaaggaaataacttcctataaaaagaagacagaagaattctcagagccctcttcgtgatgtttgcattcaactcacagtgctgaacctttctttgatagtgcagctttgaaacactctttttgtagaaactgcaagtggatgtttggtcctctctgaggatttcgttggaaacgggataaaccgcacagaactaaaacagaagcattctcagaaccttcttcgtgatgtttgcattcaactcacagtgttgaacctttctttgatagttcaggtttgaaacggtctttctgtagaaactgcaagtagatatttggacctctctgaggatttcgttggaaacgggataacccgcacagaactaaaacagaagcattcacagaaaactcttggtgacgactgagtttaactcacagagctgaacattcctttggatggagcagtttcgaaacacactatttgtagaatgtgcaagtggatatttaggcctctctgaggatttcgttggaaacgggataaaccgcacagaactaaacagaagcattctcagaaactactttgtgatgattgcattcaagtcacagagttgaacattccctttgacagagcagtttggaaactctctttgtgtagaatctgcaagtggagatatggaccgctttgaggcctatggtagtaaaggaaatagcttcatataaaagctagacagtagcattctcagaaacttctttgtgatgcttgcattcaactcacagagttgaactttcctttcgagagagaagctttgaaacactctttttccagaatctgcaagtggacatttggagggctttgaggcctgtggtggaaaaggaattatcttcccgtaaaagctagatagaagcattgtcagaaacttctttgtgatgattgcattcaactcacagagttgaaggttccttttcaaacagcagtttccaatcactctttctgtggaatctgcaagtggatatttgggcctctctgaggatttcgttggaaacgggataaaacgcacagaactaaaacagaagcattctcagaaacttctctgtgatgtttgtgttcaactcccagagtttcacgttgcttttcatagagtagttctgaaacatgcttttcgtagtgtctgcaagtggacatttggagcgctttcaggcctgtggtggaaaacgaattatggtcacataaaaactggagagaagccttctcagaaacttctctgtgatgattgcattcaactcacagagttgaaccctcctatgggatagagcagtgttgaaactctctttttgtggaatctgcaagtggatatgtggacctctccgaagatgtctttggaaacgggaatatcttcacataaaaactaaacagaagcattctcagaaacttcttggtgatgtttgcattcaaatcccagagttgaaccttcctttgatagttcaggtttgaaacactctttttgtaggatctgcaagtggatatttggaccactctgtggccttcgttcgaaacgggtatatcttcgcataaaatctagacagaagcattctcagaaaatactttgtgatgattgagtttaactcacagagctgaacattcctttggatggagcaggtttgagacacactttttgtagaatctacaagtggatatttggacctctctgaggatttcgttggaaacgcgataactgcacctaactaaacggaagcattctcagaaactgctttgtgatgattgcattcacctcacagagttgaacattcctattgatagagcagtttggaaacactcttgttgtggaatgtgcaagtggagatttggagcgctttgaggtctatggtagtaaagggaatagcttcatagaaaaactagacagatgcattctcaggaactttttggtgatgtttgtattcaactcccagagttgaactttcctttggaaagagcagctatgaaacactctttttctagaatctgcaagtggacgtttggagggctttgtggtttgtggtggaaaaggaaatatcttcacctaaatactagatagaagcattctcagaagcttctctgtgatgactgcattcaactcacggagttcaacactccttttgagagcgcagttttgaaactctctttctgtggcatctgcaaggggacatgtagacctctttgaagatttcgttggaaacggaatcatcttcacataaaaactatacagaagcagtctcagaatcttctttgtgatgtttgcattcaaatccccgagttgaactttcctttcaaagttcacgtttgaaacactctttttgcaggatctacaagtggatatttggaccactctgtgtccttcgttcgaaacgggtatatcttcacatgacatctagacagaagctttctcagaaaattctttgggatgattgagtggaactcacagagctgaacattccttgcgatgtagcagtttagaaacacactttctgcagaatctgcaagtgcatatttggacctctctgaggaattcgttggaaacgggataatttcagctgactaaacagaagcattctcagaaccttcttcgtgatgtctgcattcaactcacagtgtggaacctttctttgatagttcaggtttgaaacactctttttgtagaaactgcaaggggataattgcacttctttgaggcctaccgtagtaaaggaaataacttcctatagaaagaagacagaagcattctcagaaccctcttcgtgatgtttgcattcaactcacagtgctgaacctttctttgatagttcagctttgaaacactcttcttgtagaaactgcaagtggatatttggtcctctctgaggatttcgttggaaacgggataaaccgcacagaactaaacagaagcattctcagaaccttcttcgtgatgtttgcattcaactcacagtgttgaacctttctttgatagttcaggtttgaaacggtctttctgtagaaactgcaagtagatatttggacctctctgaggatttcgttggaaacgggataacccgcacagaactaaaacagaagcattcacagaaaactcttggtgacgactgagtttaactcacagagctgaacattcctttggatggagcagtttcgaaacacactatttgtagaatctgcaagtggatatttgggcctctctgaggatttcgttggaaacgggataaaacgcacagaactaaaacagaagcattctcagaaactactttgtgatgattgcattcaagtcacagagttgaacattccctttgacagagcagtttggaaactctctttgtgtagaatctgcaagtggagatatggaccgctttgaggcctatggtagtaaaggaaatagcttcatataaaagctagacagtagcattctcagaaacttctttgtgatgcttgcattcaactcacagagttgaactttcctttcgagagagaagctttgaaacactctttttccagaatctgcaagtggacatttggagggctttgaggcctgtggtggaaaaggaattatcttcccgtaaaagctagatagaagcattgtcagaaacttctttgtgatgattgcattcaactcacagagttgaaggttccttttcaaacagcagtttccaatcactctttctgtggaatctgcaagtggatatttgggcctctctgaggatttcgttggaaacgggataaaacgcacagaactaaaacagaagcattctcagaaacttctctgtgatgtttgtgttcaactcccagagtttcacgttgcttttcatagagtagttctgaaacatgcttttcgtagtgtctgcaagtggacatttggagcgctttcaggcctgtggtggaaaacgaattatggtcacataaaaactggagagaagccttctcagaaacttctctgtgatgattgcattcaactcacagagttgaaccctcctatggatagagcagtgttgaaactctctttttgtggaatctgcaagtggatatgtggacctctccgaagatgtctttggaaacgggaatatcttcacataaaaactaaacagaagcattctcagaaacttcttggtgatgtttgcattcaaatcccagagttgaaccttcctttgatagttcaggtttgaaacactctttctgtaggatctgcaagtggctatttggaccactctgtggccttcgttcgaaacgggtatatcttcgcataaaatctagacagaagcattctcagaaaatactttgtgatgattgagtttaaatcacagagctgaccattcctttggatggagcaggtttgagacacactttttgtagaatctacaagtggatatttggacctctctgaggatttcgttggaaacgggataactgcacctaactaaacggaagcattctcagaaactgctttgtgatgattgcattcacctcacagagttgaacattcctattgatagagcagtttggaaacactcttgttgcggaatgtgcaagtggagatttggagcgctttgaggcctgtggtagtaaagggaatagcttcatagaaaaactagacagatgcattctcaggaactttttggtgatgtttgtattcaactcccagagttgaactttcctttggaaagagcagctatgaaacactctttttctagaatctgcaagtggacgtttggagggctttgtggtttgtggtggaaaaggaaatatcttcacctaaatactagatagaagcattctcagaagcttctctgtgatgactgcattcaactcacggagttgaacactccttttgagagcgcagttttgaaactctctttctgtggcatctgcaaggggacatgtagacctctttgaagatttcgttggaaacggaatcatcttcacataaaaactatacagaagcagtctcagaatcttctttgtgatgtttgcattcaaatccccgagttgaactttcctttcaaagttcacgtttgaaacactctttttgcaggatctacaagtggatatttggaccactctgtgtccttcgatcgaaacgggtatatcttcacatgacatctagacagaagctttctcagaaaattctttgggatgattgagttgaactcacagagctgagcattccttgcgatgtagcagtttagaaacacactttctgcagaatctgcaagtgcatatttggacctctgtgaggaattcgttggaaacgggataatttcagctgactaaacagaagcattctcagaaccttcttcgtgatgtctgcattcaactcacagtgtggaacctttctttgatagttcaggtttgaaacactctttttgtagaaactgcaaggggataattgcacttctttgaggcctaccgtagtaaaggaaataacttcctatagaaagaagacagaagaactctcagagccctcttcgtgatgtttgcattcaactcacagtgctgaacctttctttgatagtgcagctttgaaacactctttttgtagaaactgcaagtggatatttggtcctctctgaggatttcgttggaaacgggataaaccgcacagaactaaaacagaagcattctcagaaccttcttcgtgatgtttgcattcaactcacagtgttgaacctttctttgatagttcaggtttgaaacggtctttctgtagaaactgcaagtagatatttggacctctctgaggatttcgttggaaacgggataaaccgcacagaactaaaacagaagcattcacagaaaactcttggtgacgactgagtttaactcacagagctgaacattcctttggatggagcagtttcgaaacacactatttgtagaatctgcaagtggatatgtgggcctctctgaggatttcgttggaaacgggatagaacgcacagaactaaaacagaagcattctcagaaactactttgtgatgattgcattcaagtcacagagttgaacattccctttgacagagcagtttggaaactctctttgtgtagaatctgcaagtggagatatggaccgctttgaggcctatggtagtaaaggaaatagcttcatataaaagctagacagtagcattctcagaaacttctttgtgatgcttgcattcaactcacagagttgaactttcctttcgagagagaagctttgaaacactctttttccagaatctgcaagtggacatttggagggctttgaggcctgtggtggaaaaggaattatcttcccgtaaaagctagatagaagcattgtcagaaacttctttgtgatgattgcattcaactcacagagttgaaggttccttttcaaagagcagtttccaatcactctttgtgtggaatctgcaagtggatatttggacctattttgaagatttcgttggaaacgggagaatcttcacaggaaagctaaacagaagcattctcagaaacttctctgtgatgtttgtgttcaactcccagagtttcacattgcttttcatagagtagttctgaaacatgcttttcgtagtgtctgcaagtggacatttggagcgctttcaggcctgtggtggaaaacgaattatggtcacataaaaactggagagaagccttctcagaaacttctctgtgatgattgcattcaactcacagagttgaaccctcctatggatagagcagtgttgaaactctctttttgtggaatctgcaagtggatatgtggacctctccgaagatgtctttggaaacgggaatatcttcacataaaaactaaacggaagcattctcagaaacttcttggtgatgtttgcattcaaatcccagagttgaaccttcctttgatagttcaggtttgaaacactctttttgtaggatctgcaagtggatatttggaccactctgtggccttcgttcgaaacgggtacatcttcgcataaaatctagacagaagcattctcagaaaatactttgtaatgattgagttcaactcacagagctgaacattcctttggatggagcaggtttgagacacactttttgtagaatctacaagtggatatttggacctctctgaggatttcgttggaaacgggataactgcacctaactaaacggaagcattctcagaaactgctttgtgatgattgcattcacctcacagagttgaacattcctattgatagagcagtttggaaacactcttgttgtggaatgtgcaagtggagatttggagcgctttgaggcctatggtagtaaagggaatagcttcatagaaaaactagacagatgcattctcaggaactttttggtgatgtttgtattcaactcccagagttgaactttcctttggaaagagcagctatgaaacactctttttctagaatctgcaagtggacgtttggagggctttgtggtttgtggtggaaaaggaaatatcttcacctaaatactagatagaagcattctcagaagcttctctgtgatgtctgcattcaactcacggagttgaacactccttttgagagcgcagttttgaaactctctttctgtggcatctgcaaggggacatgtatacctctttgaagatttcgttggaaacggaatcatcttcacataaaaactatacagaagcagtctcagaatcttccttgtgatgtttgcattcaaatcccacagttgaactttcctttcaaagttcacgcttgaaacactctttttgcaggatctacaagtggatatttggaccactctgtgtccttcgttcgaaacgggtatatcttcacatgacatctacacagaagctttctcagaaaattctttgggatgattgagtggaactcaacagagctgaacattccttgcgatgtagcagtttagaaacacactttctgcagaatctgcaagtgcatatttggacctctctgaggaattcgttggaaacgggataatttcagctgactaaacagaagcattctcagaaccttcttcgtgatgtctgcattcaactcacagtgtggaacctttctttgatagttcaggtttgaaacactctttttgtagaaactgcaaggggatagctgcacttgtttgaggcctaccgtagtaaaggaaataacttcctataaaaagaagacagaagcattctcagaaccctcttcgtgatgtttgcattcaactcacagtgctgaacctttctttgatagtgcagctttgaaacactctttttgtagaaactgcaagtggatatttggtcctctctgaggatttcgttggaaacgggataaaacgcacagaactaaacagaagcattctcagaaccttcttcgtgatgtttgcattcaactcacagtgttgaacctttctttgatagttcaggtttgaaacggtctttctgtagaaactgcaagtagatatttggacctctctgaggatttcgttggaaacgggataacccgcacagaactaaaacagaagcattcacagaaaactcttggtgacgactgagtttaactcacagagctgaacattcctttggatggagcagtttcgaaacacactatttgtagaatctgcaagtggatatttgggcctctctgaggatttcgttggaaacgggataaaccgcacagaactaaaacagaagcattctcagaaactactttgtgatgattgcattcaagtcacagagttgaacattccctttgacagagcagtttggaaactctctttgtgtagaatctgcaagtggagatatggaccgcgttgaggcccatggtagtaaaggaaatagcttcatataaaagctagacagtagcattctcagaaacttctttgtgatgcttgcattcaactcacagagttgaactttcctttcgagagagaagctttgaaacactctttttccagaatctgcaagtggacatttggagggctttgaggcctgtggtggaaaaggaattaacttcccgtaaaagctagatagaagcattgtcagaaacttctttgtgatgattgcattcaactcacagagttgaaggttccttttcaaagagcagtttccaatcactctttctgtggaatctgcaagtggatatttggacctattttgaagatttcgttggaaacgggagaatcttcacaggaaagctaaacagaagcattctcagaaacttctctgtgatgtttgtgttcaactcccagagtttcacgttgcttttcatagagtagttctgaaacatgcttttcgtagtgtctgcaagtggacatttggagcgctttcaggcctgtggtggaaaacgaattatggtcacataaaaactggagagaagccttctcagaaacttctctgtgatgattgcattcaactcacagagttgaaccctcctatggatagagcagtgttgaaactctctttttgtggaatctgcaagtggatatgtggacctctccgaagatgtctttggaaacgggaatatcttcacataaaaactaaacagaagcattctcagaaacttcttggtgatgtttgcattcaaatcccagagttgaaccttcctttgatagttcaggtttgaaacactctttttgtaggatctgcaagtggatatttggaccactctgtggccttcgttcgaaacgggtacatcttcgcataaaatctagacagaagcattctcagaaaatactttgtgatgattgagtttaaatcacagagctgaccattcctttggatggagcaggtttgagacacactttttgtagaatctacaagtggatatttggacctctctgaggatttcgttggaaacgggataactgcacctaactaaacggaagcattctcagaaactgctttgtgatgattgcattcacctcacagagttgaacattcctattgatagagcagtttggaaacactcttgttgtggaatgtgcaagtggagatttggagcgctttgaggcctgtggtagtaaagggaatagcttcatagaaaaactagacagatgcattctcaggaactttttggtgatgtttgtattcaactcccagagttgaactttcctttggaaagagcagctatgaaacactctttttctagaatctgcaagtggacgtttggagggctttgtggtttgtggtggaaaaggaaatatcttcacctaaatactagatagaagcattctcagaagcttctctgtgatgactgcattcaactcacggagttgaacactccttttgagagcgcagttttgaaactctctttctgtggcatctgcaaggggacatgtagacctctttgaagatttcgttggaaacggaatcatcttcacataaaaactatacagaagcagtctcagaatcttctttgtgatgtttgcattcaaatcccagagttgaactttcctttcaaagttcacgtttgaaacactctttttgcaggatctacaagtggatatttggaccactctgtgtccttcgttcgaaacgggtatatcttcacacgacatctagacagaagctttctcagaaaattctttgggatgattgagttgaactcacagagctgagcattccttgcgatgtagcagtttagaaacacactttctgcagaatctgcaagtgcatatgtggacctctgtgaggaattcgttggaaacgggataatttcagctgactaaacagaagcattctcagaaccttcttcgtgatgtctgcattcaactcacagtgtggaagctttctttgatagttcagctttgaaacactctttttgtagaaactgcaaggggataattgcacttctttgaggcctaccgtagtaaaggaaataacttcctataaaaagaagacagaagcattctcagaaccttcttcgtgatgtttgcattcaaatcacagtgctgaacctttctttgatagttcagctttgaaacactctttttgtagaaactgcaagtggatatttggtcctctgtgaggatttcgttggaagcgggataaaccgcacagaactaaacagaagcattcacagaaaactcttggtgacgactgagtttaactcacagagctgaacatcgctttggatggagcagtttcgaaacacactatttgtagaatgtgcaagtggatattggggcctctctgaggatttcgttggaaacgggataaaccgcacagaactaaacagaagcattcttagaaattacttcgtgatgattgcattcaagtcacagagttgaacattccctttgacagagcagtttggaaactctctttgtgtagaatctgcaagtggagatatggaccgctttgaggcctatggtagtaaaggaaatagcttcatataaaagctagacagtagcattctcagaaacttctttgtgatgcttgcattcaactcacagagttgaactttcctttcgagagagaagctttgaaacactctttttccagaatctgcaagtggacatttggagggctttgaggcctgtggtggaaaaggaattatcttcccgtaaaagctagatagaagcattgtcagaaacttctttgtgatgattgcattcaactcacagagttgaaggttccttttcaaacagcagtttccaatcactctttctgtggaatctgcaagtggatatttgggcctctctgaggatttcgttggaaacgggataaaacgcacagaactaaaacagaagcattctcagaaacttctctgtgatgtttgtgttcaactcccagagtttcacgttgcttttcatagagtagttctgaaacatgcttttcgtagtgtctgcaagtggacatttggagcgctttcaggcctgtggtggaaaacgaattatggtcacataaaaactggagagaagccttctcagaaacttctctgtgatgattgcattcaactcacagagttgaaccctcctatggatagagcagtgttgaaactctctttttgtggaacctgcaagtggatatgtggacctctccgaagatgtctttggaaacgggaatatcttcacataaaaactaaacagaagcattctcagaaacttcttggtgatgtttgcattcaaatcccagagttgaaccttcctttgatagttcaggtttgaaacactctttctgtaggatctgcaagtggctatttggaccactctgtggccttcgttcgaaacgggtatatcttcgcataaaatctagacagaagcattctcagaaaatactttgtgatgattgagttgaactcacagagctgaacattcctttggatggagcagctttgagacacactttttgtagaatctacaagtggatatttggacctctctgaggatttcgttggaaacgggataactgcacctaactaaacggaagcattctcagaaactgctttgtgatgattgcattcacctcacagagttgaacattcctattgatagagcagtttggaaacactcttgttgtggaatgtgcaagtggagatttggagcgctttgaggcctatggtagtaaagggaatagcttcatagaaaaagtagacagatgcattctcaggaactttttggtgatgtttgtattcaactcccagagttgaactttcctttggaaagagcagctatgaaacactctttttctagaatctgcaagtggacgtttggagggctttgtggtttgtggtggaaaaggaaatatcttcaccgaaatactagagagaagcattctcagaagcttctctgtgatgactgcattcaactcacggagttgaacactccttttgagagcgcagttttgaaactctctttctgtggcatctgcaaggggacatgtagacctctttgaagatttcgttggaaacggaatcatcttcacataaaaactatacagaagcagtctcagaatcttctttgtgatgtttgcattcaaatcccagagttgaactttcctttcaaagttcacgtttgaaacactctttttgcaggatctacaagtggatatttggaccactctgtgtccttcgttcgaaacgggtatatcttcacaggacatctagacagaagctttctcagaaaattctttgggatgattgagtggaactcacagagctgaacattccttgcgatgtagcagtttagaaacacactttctgcagaatctgcaagtgcatatttggacctctctgaggaattcgttggaaacgggataatttcagctgactaaacagaagcattctcagaaccttcttcgtgatgtctgcattcaactcacagtgtggaacctttctttgatagttcaggtttgaaacactctttttgtagaaactgcaaggggataattgcacttctttgaggcctaccgtagtaaaggaaataacttcctatagaaagaagacagaagcattctcagaaccctcttcgtgatgtttgcattcaactcacagtgctgaacctttctttgatagttcagctttgaaacactctttttgtagaaactgcaagtggatatttggtcctctctgaggatttcgttggaaacgggataaactgcacagaactaaacagaagcattctcagaaccttcttcgtgatgtttgcattcaactcacagtgttgaacctttctttgatagttcaggtttgaaacggtctttctgtagaaactgcaagtagatatttggacctctctgaggatttcgttggaaacgggataacccgcacagaactaaaacagaagcattcacagaaaactcttggtgacgactgagtttaactcacagagctgaacattcctttggatggagcagtttcgaaacacactatttgtagaatgtgcaagtggatatttgggcctctctgaggatttcgttggaaacgggataaaccgcacagaactaaacagaagcattctcagaaactactttgtgatgattgcattcaagtcacagagttgaacattccctttgacagagcagtttggaaactctctttgtgtagaatctgcaagtggagatatggaccgctttgaggcctatggtagtaaaggaaatagcttcatataaaagctagacggtagcattctcagaaacttctttgtgatgcttgcattcaactcacagagttgaactttcctttcgagagagaagctttgaaacactctttttccagaatctgcaagtggacatttggagggctttgaggcctgtggtggaaaaggaattaacttcccgtaaaagctagatagaagcattgtcagaaacttctttgtgatgattgcattcaactcacagagttgaaggttccttttcaaacagcagtttccaatcactctttctgtggaatctgcaagtggatatttgggcctctctgaggatttcgttggaaacgggataaaacgcacagaactaaaacagaagcattctcagaaacttctctgtgatgtttgtgttcaactcccagagtttcacgttgcttttcatagagtagttctgaaacatgcttttcgtagtgtctgcaagtggacatttggagcgctttcaggcctgtggtggaaaacgaattatggtcacataaaaactggagagaagccttctcagaaacttctctgtgatgattgcattcaactcacagagttgaaccctcctatggatagagcagtgttgaaactctctttttgtggaatctgcaagtggatatgtggacctctccgaagatgtctttggaaacgggaatatcttcacataaaaactaaacagaagcattctcagaaacttcttggtgatgtttgcattcaaatcccagagttgaaccttcctttgatagttcaggtttgaaacactctttttgtaggatctgcaagtggatatttggaccactctgtggccttcgttcgaaacgggtatatcttcgcataaaatctagacagaagcattctcagaaaatactttgtgatgattgagttgaactcacagagctgaacattcctttggatggagcaggtttgagacacactttttgtagaatctacaagtggatatttggacctctctgaggatttcgttggaaacgggataactgcacctaactaaacggaagcattctcagaaactgctttgtgatgattgcattcacctcacagagttgaacattcctattgatagagcagtttggaaacactcttgttgtggaatgtgcaagtggagatttggagcgctttgaggcctatggtagtaaagggaatagcttcatagaaaaactagacagatgcattctcaggaactttttggtgatgtttgtattcaactcccagagttgaactttcctttggaaagagcagctatgaaacactctttttctagaatctgcaagtggacgtttggagggctttgtggtttgtggtggaaaaggaaatatcttcacctaaatactagatagaagcattctcagaagcttctctgtgatgactgcattcaactcacggagttgaacactccttttgagagcgcagttttgaaactctctttctgtggcatctgcaaggggacatgtagacctctttgaagatttcgttggaaacggaatcatcttcacataaaaactatacagaagcagtctcagaatcttctttgtgatgtttgcattcaaatcccagagttgaactttcctttcaaagttcacgtttgaaacactctttttgcaggatctacaagtggatatttggaccactctgtgtccttcgttcgaaacgggtatatcttcacacgacatctagacagaagctttctcagaaaattctttgggatgattgagtggaactcacagagctgaacattccttgcgatgtagcagtttagaaacacactttctgcagaatctgcaagtgcatatttggacctctctgaggaattcgttggaaacgggataatttcagctgactaaacagaagcattctcagaaccttcttcgtgatgtctgcattcaactcacagtgtggaacctttctttgatagttcaggtttgaaacactctttttgtagaaactgcaaggggataattgcactctttgaggagtaccgtagtaaaggaaataacttcctataaaaagaagacagaagcattctcagaaccctcttcgtgatgtttgcattcaactcacagtgctgaacctttctttgatagttcagctttgaaacactcttcttgtagaaactgcaagtggatatttggtcctctctgaggatttcgttggaaacgggataaaccgcacagaactaaacagaagcattctcagaaccttcttcgtgatgtttgcattcaactcacagtgttgaacctttctttgatagttcaggtttgaaacggtctttctgtagaaactgcaagtagatatttggacctctctgaggatttcgttggaaacgggataaaccgcacacaactaaaacagaagcattcacagaaaactcttggtgacgactgagtttaactcacagagctgaacattcctttggatggagcagtttcgaaacacactatttgtagaatgtgcaagtggatatttgggcctctctgaggatttcgctggaaacgggataaaccgcacagaactaaacagaagcattctcagaaactactttgtgatgattgcattcaagtcacagagttgaacattccctttgacagagcagtttggaaactctctttgtgtagaatctgcaagtggagatatggaccgctttgaggcctatggtagtaaaggaaatagcttcatataaaagctagacagtagcattctcagaaacttctttgtgatgcttgcattcaactcacagagttgaactttcctttcgagagagaagctttgaaacactctttttccagaatctgcaagtggacatttggagggctttgaggcctgtggtggaaaaggaattatcttcccgtaaaagctagatagaagcattgtcagaaacttctttgtgatgattgcattcaactcacagagttgaaggttccttttcaaacagcagtttccaatcactctttctgtggaatctgcaagtggatatttgggcctctctgaggatttcgttggaaacgggataaaacgcacagaactaaaacagaagcattctcagaaacttctctgtgatgtttgtgttcaacttccagagtttcacattgcttttcatagagtagttctgaaacatgcttttcgtagtgtctgcaagtggacatttggagcgctttcaggcctgtggtggaaaacgaattatggtcacataaaaactggagagaagccttctcagaaacttctctgtgatgattgcattcaactcacagagttgaaccctcctatggatagagcagtgttgaaactctctttttgtggaatctgcaagtggatatgtggacctctccgaagatgtctttggaaacgggaatatcttcacataaaaactaaacagaagcattctcagaaacttcttggtgatgtttgcattcaaatcccagagttgaaccttcctttgatagttcaggtttgaaacactctttctgtaggatctgcaagtggctatttggaccactctgtggccttcgttcgaaacgggtatatcttcgcataaaatctagacagaagcattctcagaaaatactttgtgatgattgagttgaactcacagagctgaacattcctttggatggagcaggtttgagacacactttttgtagtatctacaagtggatatttggacctctctgaggatttcgttggaaacgggataactgcagctaactaaacggaagcattctcagaaactgctttgtgatgattgcattcacctcacagagttgaacattcctattgatagagcagtttggaaacactcttgctgtggaatgtgcaagtggagatttggagcgctttgaggcctatggtagtaaaggaaatagcttcatagaaaaactagacagatgcattctcaggaactttttggtgatgtttgtattcaactcccagagttgaactttcctttggaaagagcagctatgaaacactctttttctagaatctgcaagtggacgtttggagggctttgtggtttgtggtggaaaaggaaatatcttcacctaaatactagatagaagcattctcagaagcttctctgtgatgactgcattcaactcacggagttgaacactccttttgagagcgcagttttgaaactctctttctgtggcatctgcaaggggacatgtagacctctttgaagatttcgttggaaacggaatcatcttcacatcaaaactatacagaagcagtctcagaatcttctttgtgatgtttgcattcaaatcccagagttgaactttcctttccaagttcacgtttgaaacactctttttgcaggatctgcaagtggatatttggaccactctgtgtccttcgttcgaaacgggtatatcttcacatgacatctagacagaagctttctcagaaaattctttgggatgattgagttgaactcacagagctgagcattccttgcgatgtagcagtttagaaacacactttctgcagaatctgcaagtgcatatttggacctctgtgaggaattcgttggaaacgggataatttcagctgactaaacagaagcattctcagaaccttcttcgtgatgtctgcattcaactcacagtgtggaacctttctttgatagttcaggtttgaaacactctttttgtagaaactgtaaggggataattgcacttctttgaggcctaccgtagtaaaggaaataacttcctataaaaagaagacagaagcattctcagaaccctcttcgtgatgtttgcattcaactcacagtgctgaacctttctttgatagttcagctttgaaacactcttcttgtagaaactgcaagtggatatttggtcctctctgaggatttcgttggaaacgggataaaccgcacagaactaaacagaagcattctcagaaccttcttcgtgatgtttgcattcaactcacagtgttgaacctttctttgatagttcaggtttgaaacggtctttgtgtagagactgcaagtagatatttggacctctctgaggatttcgttggaaacgggataaaccgcacagaactaaaacagaagcattcacagaaaactcttggtgacgactgagtttaactcacagagctgaacattcctttggatggagcagtttcgaaacacactatttgtagaatgtgcaagtggatatttaggcctctctgaggatttcgttggaaacgggataaaccgcacagaactaaacagaagcattctgagaaactactttgtgatgattgcattcaagtcacagagctgaacattccctttgacagagcagtttggaaactctctttgtgtagaatctgcaagtggagatatggaatgctttgaggactatggtagtaaaggaaatagcttcatagacaagctagacagtagcattctcagaaacttattcgtgatgtttgcattgaactcatagagttgaactttccttttgagagagaagctttgaaacactctttttctagaatctgcaagtggacatttggagggctttgaggcctgtgttggaaaaggaaatatcttcccgtaaaaactagagagaagcattgtcagaaacttctttgtgatgattgcattcaactcacagtagttgaaggttccttttcaaagagcagtttccaatcactctttctgtggaatctgcaagtggatatttggacctattttgaagatttcgttggaaacgggagaatcttcacaggaaagctaaacagaagcattctcagaaacttctctgtgatgtttgtgttcaactcccagagtttcatattgcttctcatagagtagttctgaaacatgcttttcgtagtgtctgcaagtggacatttggagcgctttcaggcctgtggtggaaaacgaattatggtcacataaaaactggagagaagccttctcagaaacttctctgtgatgattgcattcaactcacagagttgaaccctcctatggatagagcagtgttgaaactctctttttgtggaatctgcaagtggatatgtggacctctccgaagatgtctttggaaacgggaatatcttcacataaaaactaaacagaagcattctcagaaacttcttggtgatgtttgcattcaaatcccagagttgaaccttcctttgatagttcaggtttgaaacactctttttgtaggatctgcaagtggatatttggaccactctgtggccttcgttcgaaacgggtatatcttcgcataaaatctagacagaagcattctcagaaaatactttgtgatgattgagtttaaatcacagagctgaccattcctttggatggagcaggtttgagacacactttttgtagaatctacaagtggatatttggacctctctgaggatttcgttggaaacgggataactgcacctaactaaacggaagcattctcagaaactgctttgtgatgattgcattcacctcacagagttgaacattcctattgatagagcagtttggaaacactcttgttgtggaatgtgcaagtggagatttggagcgctttgaggcctgtggtagtaaagggaatagcttcatagaaaaactagacagatgcattctcaggaactttttggtgatgtttgtattcaactcccagagttgaactttcctttggaaagagcagctatgaaacactctttttctagaatctgcaagtggacgtttggagggctttgtggtttgtggtggaaaaggaaatatcttcacctaaatactagatagaagcattctcagaagcttctctgtgatgactgcattcaactcacggagttgaacactccttttgagagcgcagttttgaaactctctttctgtggcatctgcaaggggacatgtagacctctttgaagatttcgttggaaacggaatcatcttcacataaaaactatacagaagcagtctcagaatcttctttgtgatgtttgcattcaaatcccagagttgaactttcctttcaaagttcacgtttgaaacactctttttgcaggatctacaagtggatatttggaccactctgtgtccttcgttcgaaacgggtatatcttcacacgacatctagacagaagctttctcagaaaattctttgggatgattgagttgaactcacagagctgagcattccttgcgatgtagcagtttagaaacacactttctgcagaatctgcaagtgcatatttggacctctgtgaggaattcgttggaaacgggataatttcagctgactaaacagaagcattctcagaaccttcttcttgatgtctgcattcaactcacagtgtggaacctttctttgatagttcaggtttgaaacactctttttgtagaaacttcaaggggataattgcacttctttgaggcctaccgtagtaaaggaaataacttcctataaaaagaagacagaagaattctcagagccctcttcgtgatgtttgcattcaactcacagtgctgaacctttctttgatagtgcagctttgaaacactctttttgtagaaactgcaagtggatatttggtcctctctgaggatttcgttggaaacgggataaaccgcacagaactaaacagaagcattctcagaaccttcttcgtgatgtttgcattcaactcacagtgttgaacctttctttgatagttcaggtttgaaacggtctttctgtagaaactgcaagtagatatttggacctctctgaggatttcgttggaaacgggataacccgcacagaactaaaacagaagcattcacagaaaactcttggtgacgactgagtttaactcacagagctgaacattcctttggatggagcagtttcgaaacacactatttgtagaatgtgcaagtggatatttaggcctctctgaggatttcgttggaaacgggataaaccgcacagaactaaacagaagcattctcagaaactactttgtgatgattgcattcaagtcacagagttgaacattccctttgacagagcagtttggaaactctctttgtgtagaatctgcaagtggagatatggaccgctttgaggcctatggtagtaaaggaaatagcttcatataaaagctagacagtagcattctcagaaacttctttgtgatgcttgcattcaactcacagagttgaactttcctttcgagagagaagctttgaaacactctttttccagaatctgcaagtggacatttggagggctttgaggcctgtggtggaaaaggaattatcttcccgtaaaagctagatagaagcattgtcagaaacttctttgtgatgattgcattcaactcacagagttgaaggttccttttcaaagagcagtttccaatcactctttctgtggaatctgcaagtggatatttggacctattttgaagatttcgttggaaacgggagaatcttcacaggaaagctaaacagaagcattctcagaaacttctctgtgatgtttgtgttcaactcccagagtttcacattgcttttcatagagtagttctgaaacatgcttttcgtagtgtctacaagtggacatttggagcgctttcaggcctgtggtggaaaacgaattatggtcacataaaaactggagagaagccttctcagaaacttctctgtgatgattgcattcaactcacagagttgaaccctcctatggatagagcagtgttgaaactctctttttgtggaatctgcaagtggatatgtggacctctccgaagatgtctttggaaacgggaatatcttcacataaaaactaaacagaagcattctcagaaacttcttggtgatgtttgcattcaaatcccagagttgaaccttcctttgatagttcaggtttgaaacactctttctgtaggatctgcaagtggctatttggaccactctgtggccttcgttcgaaacgggtatatcttcgcataaaatctagacagaagcattctcagaaaatactttgtgatgattgagtttaaatcacagagctgaccattcctttggatggagcaggtttgagacacactttttgtagaatctacaagtggatatttggacctctctgaggatttcgttggaaacgggataactgcacctaactaaacggaagcattctcagaaactgctttgtgatgattgcattcacctcacagagttgaacattcctattgatagagcagtttggaaacactcttgttgtggaatgtgcaagtggagatttggagcgctttgaggcctgtggtagtaaagggaatagcttcatagaaaaactagacagatgcattctcaggaactttttggtgatgtttgtattcaactcccagagttgaactttcctttggaaagagcagctatgaaacactctttttctagaatctgcaagtggacgtttggagggctttgtggtttgtggtggaaaaggaaatatcttcacctaaatactagagagaagcattctcagaagcttctctgtgatgactgcattcaactcacggagttgaacactccttttgagagcgcagttttgaaactctctttctgtggcatccgcaaggggacatgtggacctctttgaagatttcgttggaaacggaatcatcttcacataaaaactatacagaagcagtctcagaatcttctttgtgatgtttgcattcaaatcccagagttgaacttttctttcaaagttcacgtttgaaacactctttttgcaggatctacaagtggatatttggaccactctgtgtccttcgttcgaaacgggtatatcttcacatgacatctagacagaagctttctcagaaaattctttgggatgattgagtagaactcacagagctgagcattccttgcgatgtagcagtttagaaacacactttctgcagaatctgcaagtgcatatttggacctctgtgaggaattcgttggaaacgggataatttcagctgactaaacagaagcattctcagaaccttcttcgtgatgtctgcattcaactcacagtgtggaacctttctttgatagttcaggtttgaaacactctttttgtagaaactgcaaggggataattgcacttctttgaggcctaccgtagtaaaggaaataacttcctatagaaagaagacagaagcattctcagaaccctcttcgtgatgtttgcattcaactcacagtgctgaacctttctttgatagttcagctttgaaacactcttcttgtagaaactacaagtggatatttggtcctctctgaggatttcgttggaaacgggataaaccgcacagaactaaacagaagcattctcagaaccttcttcgtgatgtttgcattcaactcacagtgttgaacctttctttgatagttcaggtttgaaacggtctttctgtagaaactgcaagtagatatttggacctctctgaggatttcgttggaaacgggataaaccgcacagaactaaaacagaagcattcacagaaaactcttggtgacgactgagtttaactcacagagctgaacattcctttggatggagcagtttcgaaacacactatttgtagaatgtgcaagtggatatttaggcctctctgaggatttcgttggaaacgggataaaccgcacagaactaaacagaagcattctcagaaactactttgtgatgattgcattcaagtcacagagttgaacattccctttgacagagcagtttggaaactctctttgtgtagaatctgcaagtggagatatggaccgctttgaggcctatggtagtaaaggaaatagcttcatataaaagctagacagtagcattctcagaaacttctttgtgatgcttgcattcaactcacagagttgaactttcctttcgagagagaagctttgaaacactctttttccagaatctgcaagtggacatttggagggctttgaggcctgtggtggaaaaggaattatcttcccgtaaaagctagatagaagcattgtcagaaacttctttgtgatgattgcattcaactcacagagttgaaggttccttttcaaacagcagtttccaatcactctttctgtggaatctgcaagtggatatttgggcctctctgaggatttcgttggaaacgggataaaacgcacagaactaaaacagaagcattctcagaaacttctctgtgatgtttgtgttcaactcccagagtttcacattgcttttcatagtgtagttctgaaacatgcttttcgtagtgtctgcaagtggacatttggagcgctttcaggcctgtggtggaaaacgaattatggtcacataaaaactggagagaagccttctcagaaacttctctgtgatgattgcattcaactcacagagttgaaccctcctatggatagagcagtgttgaaactctctttttgtgaaatctgcaagtggatatgtggacctctccgaagatgtctttggaaacgggaatatcttcacataaaaactaaacagaagcattctcagaaacttcttggtgatgtttgcattcaaatcccagagttgaaccttcctgtgatagttcaggtttgaaacactctttttgtaggatctgcaagtggatatttggaccactctgtggccttcgttcgaaacgggtacatcttcacataaaatctagacagaagcattctcagaaaatactttgtgatgattgagttgaactcacagagctgaacattcctttggatggagcaggtttgagacacactttttgtagaatctacaagtggatatttggacctctctgaggatttcgttggaaacgggataactgcacctaactaaacggaagcattcccagaaactgctttgtgatgattgcattcacctcacagagttgaacattcctattgatagagcagtttggaaacactcttgttgtggaatgtgcaagtggagatttggagcgctttgaggtctatggtagtaaagggaatagcttcatagaaaaactagaccgatgcattctcaggaactttttggtgatgtttgtattcaactcccagagttgaactttcctttggaaagagcagctatgaaacactctttttctagaatctgcaagtggacgtttggagggctttgtggtttgtggtggaaaaggaaatatcttcacctaaatactagatagaagcatcctcagaagcttctctgtgatgactgcattcaactcacggagttgaacactccttttgagagcgcagttttgaaactctctttctgtggcatctgcaaggggacatgtagacctctttgaagatttcgttggaaacggaatcatcttcacataaaaactatacagaaggagtctcagaatattctttgtgatgtttgcattcaaatcccagagttgaactttcctttcaaagttcacgtttgaaacactctttttgcaggatctacaagtggatatttggaccactctgtgtccttcgttcgaaacgggtatatcttcacatgacatctagacagaagctttctcagaaaattctttgggatgattgagtggaactcacagagctgaacattccttgcgatgtagcagtttagaaacacactttctgaagaatctgcaagtgcatatttggacctctctgaggaattcgttggaaacgggataatttcagctgactaaacagaagcattctcagaaccttcttcgtgatgtctgcattcaactcacagtgtggaacctttctttgatagttcacgtttgaaacactctttttgtagaaactgcaaggggataattgcacttctttgaggcctaccgtagtaaaggaaataacttcctataaaaagaagacagaagcattcacagaaaactcttggtgacgactgagtttaactcacagtagctgaacattcctttggatggagcagtttcgaaacacactatttgtagaatgtgcaagtggatatttgggcctctctgaggatttcgttggaaacgggataaaccgcacagaactaaacagaagcattctcagaaactactttgtgatgattgcattcacctcacagagttgaacattccctttgacagagcactttggaaactctcgttgtgtagcgtctgcaagttgagatatggaccgctttgaggcctatggtagtaaaggaaatagcttcatataaaaactagacagtagcattctcagaaacttctttgtgatgcttgcattcaactcacagagttgaactttcctttcgagagagaagctttgaaacactctttttccagaatctgcaagtggacatttggagggctttgaggcctgtggtggaaaaggaattaacttcccgtaaaagctagatagaagcattgtcagaaacttctttgtgatgattgcattcaactcacagggttgaaggttccttttcaaagagcagtttccaatcactctttctgtggaatctgcaagtggatatttggacctctttgaagatttcgttggaaacgggagaatcttcacaggaaagctaaacagaagcattctcagaaacttctctgtgatgtttgtgttcaactcccagagtttcacattgcttttcatagagtagttctgaaacatgcttttcgtagtgtctacaagtggacatttggagcgctttcaggcctgtggtggaaaacgaattatggtcacataaaaactggagagaagccttctcagaaacttctctgtgatgattgcattcaactcacagagttgaaccctcctatggatagagcagtgttgaaactctctttttgtggaatctgcaagtggatatgtggacctctccgaagatgtctttggaaacgggaatatcttcacataaaaactaaacagaagcattctcagaaacttcttggtgatgtttgcattcaaatcccagagttgaaccttcctttgatagttcaggtttgaaacactctttctgtaggatctgcaagtggctatttggaccactctgtggccttcgttcgaaacgggtatatcttcgcataaaatctagacagaagcattctcagaaaatactttgtgatgattgagtttaaatcacagagctgaccattcctttggatggagcaggtttgagacacactttttgtagaatctacaagtggatatttggacctctctgaggatttcgttggaaacgggataactgcacctaactaaacggaagcattctcagaaactgctttgtgatgattgcattcacctcacagagttgaacattcctattgatagagcagtttggaaacactcttgttgtggaatgtgcaagtggagatttggagcgctttgaggcctatggtagtaaagggaatagcttcatagaaaaactagacagatgcattctcaggaactttttggtgatgtttgtattcaactcccagagttgaactttcctttggaaagagcagctatgaaacactctttttctagaatctgcaagtggacgtttggagggctttgtggtttgtggtggaaaaggaaatatcttcacctaaatactagatagaagcattctcagaagcttctctgtgatgactgcattcaactcacggagttgaacactccttttgagagcgcagttttgaaactctctttctgtggcatctgcaaggggacatgtagacctctttgaagatttcgttggaaacggaatcatcttcacatcaaaactatacagaagcagtctcagaatcttctttgtgatgtttgcattcaaatccctgagttgaactttcctttccaagttcacgtttgaaacactctttttgcaggatctacaagtggatatttggaccactctgtgtccttcgttcgaaacgggtatatcttcacatgacatctagacagaagctttctcagaaaattctttgggatgattgagttgagcaaacagagctgaacactccttgcgatgtagcagtttagaaacacactttctgcagaatctgcaagtgcatatgtggacctctctgaggaattcgttggaaacgggataatttcagctgactaaacagaagcattctcagaaccttcttcgtgatgtctgcattcaactcacagtgtggaacctttctttgatagttcaggtttgaaacactctttttgtagaaactgcaaggggatcactgcacttctttgaggcctaccgtagtaaaggagataacttcctataaaaagaagacagaagcattctcagaaccttcttcgtgatgtttgcattcaactcacagtgctgaacctttctttgatagttcagctttgaaacactccttttgtagaaactgcaagtggatatttggacctctctgaggatttcgttggaaacgggataaaccgcacagaactaaaacggaagcattcacagaaaactcttggtgacgactgagtttaactcacagagctgaacattcctttggatggagcagtttcgaaacacactatttgtagaatgtgcaagtggatatgtgggcctctctgaggatttcgttggaaacgggataaaccgcacagaactaaacagaagcattctcagaaactactttgtgatgattgcattcaagtcacagagttgaacattccctttgacagagcagtttggaaactctctttgtgtagaatctgcaagtggagatatggaccgctttgaggcctatggtagtaaaggaaatagcttcatataaaagctagacagtagcattctcagaaacttctttgtgatgcttgcattcaactcacagagttgaactttcctttcgagagagaagctttgaaacactctttttccagaatctgcaagtggacatttggagggctttgaggcctgtggtggaaaaggaattatcttccctaaaagctagatagaagcattgtcagaaacttctttgtgatgattgcattcaagtcacagagttgaaggttccttttcaaagagcagtttccaatcactctttctgtggaatctgcaagtggatatttggacctctttgaagatttcgttggaaacgggagaatcttcacagaaaagctaaacagaagcattctcagaaacttctctgtgatgtttgtgttcaactcccagagtttcacgttgcttttcatagagtagttctgaaacatgcttttcgtagtgtctgcaagtggacatttggagcgctttcaggcctgtggtggaaaacgaattatggtcacataaaaactggagagaagccttctcagaaacttctctgtgatgattgcattcaactcacagatttgaaccctcctatggatagagcattgttgaaactctctttttgtggaatctgcaagtggatatgtggacctctccgaagatgtctttggaaacgggaatatcttcacataaaaactaaacagaagcattctcagaaacttcttggtgatgtttgcattcaaatcccagagttgaaccttcctttgagagttcaggtttgaaaccctctttttgtaggatctgcaagtggatatttggaccactctgtggccttcgttcgaaacgggtacatcttcgcataaaatctagacagaagcattctcagaaaatactttgtgatgattgagttgaactcacagagctgaacattcctttggatggagcaggtttgagacacactttttgtagaatctacaagtggatatttggacctctctgaggatttcgttggaaacgggataactgcacctaactaaacggaagcattctcagaaactgctttgtgatgattgcattcacctcacagagttgaacattcctattgatagagcagtttggaaacactcttgttgtggaatgtgcaagtggagatttggagcgctttgaggcctatggtagtaaaggcaatagcttcatagaaaaattagacagatgcattctcaggaactttttggtgatgtttgtattcaactcccagagttgaactttcctttggaaagagcagctatgaaacactctttttctagaatctgcaagtggacgtttggagggctttgtggtttgtggtggaaaaggaaatatcttcacctaaatactagatagaagcattctcagaagcttctctgtgatgactgcattcagctcacggagttgaacactccttttgagagcgcagttttgaaactctctttctgtggcatctgcaaggggacatgtagacctctttgaagatttcgttggaaacggaatcatcttcacataaaaactatacagaagcagtctcagaatcttctttgtgatgtttgcattcaaatcccagagttgaactttcctttcaaagttcacgtttgaaacactctttttgcaggatctacaagtggatatttggaccactctgtgtccttcgttcgaaacgggtatatcttcacacgacatctagacagaagctttctcagaaaattctttgggatgattgagtggaactcacagagctgaacattccttgcgatggagcagtttagaaacacactttctgcagaatctgcaagtgcatatttggacctctctgaggaattcgttggaaacgggataatttcagctgactaaacagaagcattctcagaaccttcttcgtgatgtctgcattcaactcacagtgtggaacctttctttgatagttcaggtttgaaacactctttttgtagaaactgcaaggggataattgcacttctttgaggcctaccgtagtaaaggaaataacttcctatagaaagaagacagaagaattctcagagccctcttcgtgatgtttgcattcaactcacagtgctgaacctttctttgatagtgcagctttgaaacactctttttgtagaaactgcaagtggatgtttggtcctctctgaggatttcgttggaaacgggataaaccgcacagaactaaaacagaagcattctcagaaaattcttcgtgatgtttgcattcaactcacagtgttgaacctttctttgatagttcaggtttgaaacggtctttctgtagaaactgcaagtagatatttggacctctctgaggatttcgttggaaacgggataaaccgcacagaactaaaacagaagcattcacagaaaactcttggtgacgactgagtttaactcacagagctgaacattcctttggatggagcagtttcgaaacacactatttgtagaatgtgcaagtggatatttgggcctctctgaggatttcgttggaaacgggataaaccgcacagaactaaacagaagcattctcagaaactactttgtgatgattgcattcaagtcacagagttgaacattccctttgacagagcagtttggaaactctctttgtgtagaatctgcaagtggagatatggaccgctttgaggcctatggtagtaaaggaaatagcttcatataaaagctagacagtagcattctcagaaacttctttgtgatgcttgcattcaactcacagagttgaactttcctttcgagagagaagctttgaaacactctttttccagaatctgcaagtggacatttggagggctttgaggcctgtggtggaaaaggaattatcttcccgtaaaagctagatggaagcattgtcagaaacttctttgtgatgattgcattcaagtcacagagttgaaggttccttttcaaagagcagtttccaatcactctttctgtggaatctgcaagtggatatttggacctctttgaagatttcgttggaaacgggagaatcttcacagaaaagctaaacagaagcattctcagaaacttctctgtgatgtttgtgttcaactcccggagtttcacattgcttctcatagagtagttctgaaacatgcttttcgtagtgtctgcaagtggacatttggagcgctttcaggcctgtggtggaaaacgaattatggtcacataaaaactggagagaagccttctcagaaacttctctgtgatgattgcattcaactcacagagttgaaccctcctatggatagagcagtgttgaaactctctttttgtggaatctgcaagcggatatgtggacctctccgaagatgtctttggcaacgggaatatcttcacataaaaactaaacagaagcattctcagaaacttcttggtgatgtttgcattcaaatcccagagttgaaccttcctttcatagttcaggtttgcaacactctttttgtaggatctgcaagtggatatttggaccactctgtggccttcgttcgaaacgggtacatcttcgcataaaatctagacagaagcattctcagaaaatactttgtgatgattgagtttaaatcacagagctgaccattcctttggatggagcaggtttgagacacactttttgtagaatctacaagtggatatttggacctctctgaggatttcgttggaaacgggataactgcacctaactaaacggaagcattctcagaaactgctttgtgatgattgcattcacctcacagagttgaacattcctattgatagagcagtttggaaacactcttgttgtggaatgtgcaagtggagatttggagcgctttgaggcctatggtagtaaagggaatagcttcatagaaaaactagacagatgcattctcaggaactttttggtgatgtttgtattcaactcccagagttgaactttcctttggaaagagcagctatgaaacactctttttctagaatctgcaagtggacgtttggagggctttgtggtttgtggtggaaaaggaaatatcttcacctaaatactagacagaagcattctcagaagcttctctgtgatgactgcattcaactcacggagttgaacactccttttgagagcgcagttttgaaactctctttctgtggcatctgcaaggggacatgtagacctctttgaagatttcgttggaaacggaatcatcttcacatcaaaactatacagaagcagtctcagaatcttctttgtgatgtttgcattcaaatcccagagttgaactttcctttcaaagttcacgtttgaaacactctttttgcaggatctacaagtggatatttggaccactctgtgtccttcgttcgaaacgggtatatcttcacatgacatctagacagaagctttctcagaaaattctttgggatgattgagtggaactcacagagctgaacattccttgcgatgtagcagtttagaaacacactttctgcagaatctgcaagtgcatatttggacctctctgaggaattcgttggaaacgggataatttcagctgactaaacagaagcattctcagaaccttcttcgtgatgtctgcattcaactcacagtgtggaacctttctttgatagttcaggtttgaaacactctttttgtagaaactgcaaggggataattgcactctttgaggagtaccgtagtaaaggaaataacttcctataaaaagaagacagaagcattctcagaaccctcttcgtgatgtttgcattcaactcacagtgctgaacctttctttgatagttcagctttgaaacactcttcttgtagaaactgcaagtggatatttggtcctctctgaggatttcgttggaaacgggataaaccgcacagaactaaacagaagcattctcagaaccttcttcgtgatgtttgcattcaactcacagtgttgaacctttctttgatagttcaggtttgaaacggtctttctgtagaaactgcaagtagatatttggacctctctgaggatttcgttggaaacgggataacccgcacagaactaaaacagaagcattcacagaaaactcttggtgacgactgagtttaactcacagagctgaacattcctttggatggagcagtttcgaaacacactatttgtagaatgtgcaagtggatatttaggcctctctgaggatttcgttggaaacgggataaaccgcacagaactaaacagaagcattctcagaaactactttgtgatgattgcattcaagtcacagagttgaacattccctttgacagagcagtttggaaactctctttgtgtagaatctgcaagtggagatatggaccgctttgaggcctatggtagtaaaggaaatagcttcatataaaagctagacagtagcattctcagaaacttctttgtgatgcttgcattcaactcacagagttgaactttcctttcgagagagaagctttgaaacactctttttccagaatctgcaagtggacatttggagggctttgaggcctgtggtggaaaaggaattaacttcccgtaaaagctagatagaagcattgtcagaaacttctttgtgatgattgcattcaactcacagagttgaaggttccttttcaaagagcagtttccaatcactctttctgtggaatctgcaagtggatatttggacctattttgaagatttcgttggaaacgggagaatcttcacaggaaagctaaacagaaggattctcagaaacttctctgtgatgtttgtgttcaactcccagagtttcacattgcttttcatagagtagttctgaaacatgcttttcgtagtgtctacaagtggacatttggagcgcttccaggcctgtggtggaaaacgaattatggtcacataaaaactggagagaagccttctcagaaacttctctgtgatgactgcattcaactcacagagttgaaccctcctatggatagagcagtgttgaaactctctttttgtggaatctgcaagtggatatgtggacctctccgaagatgttctttggaaacgggaatatcttcacataaaaactaaacagaagcattctcagaaacttcttggtgatgtttgcattcaaatcccagagttgaaccttcctttgatagttcaggtttgaaacactctttttgtaggatctgcaagtggatatttggaccactctgtggccttcgttcgaaacgggtacatcttcgcataaaatctagacagaagcattctcagaaaatactttgtgatgattgagtttaaatcacagagctgaccattcctttggatggagcaggtttgagacacactttttgtagaatctacaagtggatatttggacctctctgaggatttcgttggaaacgggataactgcacctaactaaacggaagcattctcagaaactgctttgtgatgattgcattcacctcacagagttgaacattcctattgatagagcagtttggaaacactcttgttgtggaatgtgcaagtggagatttggagcgctttgaggcctatggtagtaaagggaatagcttcatagaaaaactagacagatgcattctcaggaactttttggtgatgtttgtattcaactcccagagttgaactttcctttggaaagagcagctatgaaacactctttttctagaatctgcaagtggacgtttggagggctttgtggtttgtggtggaaaaggaaatatcttcacctaaatactagatagaagcattctcagaagcttctctgtgatgactgcattcaactcacggagttgaacactccttttgagagcgcagttttgaaactctctttctgtggcatctgcaaggggacatgtagacctctttgaagatttcgttggaaacggaatcatcttcacataaaaactatacagaagcagtctcagaatcttctttgtgatgtttgcattcaaatcccagagttgaactttcctttcaaagttcacgtttgaaacactctttttgcaggatctacaagtggatatttcgaccactctgtgtcctacgttcgaaacgggtatatcttcacatgacatctagacagaagctttctcagaaaattctttgggttgattgagttgaactcacagagctgaacattccttccgatgtagcagtttagaaacacactttctgcagaatctgcaagtgcatatttggacctctctgaggaattcgttggaaacgggataatttcagctgactaaacagaagcattctcagaaccttcttcgtgatgtgtgcattcaactcacagtgtggaacctttctttgatagttcaggtttgaaacactctttttgtagaaactgcaaggggataattgcacttctttgaggcctaccgtagtaaaggaaataacttcctatagaaagaagacagaagcattctcagaaccctcttcgtgatgtttgcattcaactcacagtgctgaacctttctttgatagttcagctttgaaacactcttcttgtagaaactgcaagtggatatttggtcctctctgaggatttcgttggaaacgggataaaccgcacagaactaaacagaagcattctcagaaccttcttcgtgatgtttgcattcaactcacagtgttgaacctttctttgatagttcaggttggaaacggtctttctgtagaaactgcaagtagatatttggacctctctgaggatttcgttggaaacgggataaaccgcacagaactaaaacagaagcattcacagaaaactcttggtgacgactgagtttaactcacagagctgaacattcctttggatggagcagtttcgaaacacactatttgtagaatgtgcaagtggatatttgggcctctctgaggatttcgttggaaacgggataaaccgcacagaactaaacagaagcattctcagaaactactttgtgatgattgcattcaagtcacagagttgaacattccctttgacagagcagtttggaaactctctttgtgtagaatctgcaagtggagatatggaccgctttgaggcctatggtagtaaaggaaatagcttcatataaaagctagacagtagtattctcagaaacttctttttgatgcttgcattcaactcacagagttgaactttcctttcgagagagaagctttgaaacactctttttccagaatctgcaagtggacatttggagggctttgaggcctgtggtggaaaaggaattatcttcccgtaaaagctagatagaagcattgtcagaaacttctttgtgatgattgcattcaactcacagagttgaaggttccttttcaaacagcagtttccaaacaccctttctgtggaatctgcaagtggatgtttggacctcttggaagatttcgttggaaacgggagaatcttcacataaaagctaaacagaagctttctcagaaacttctctgtgatgtttgtgttcaactcccagagtttcacattgcttttcatagagtagttctgaaacatgcttttcgtagtgtctgcaagtggacgtttggagcgctttcaggccagtggtggaaaacgaattatggtcacaaaaaaactggagagaagccttctcagaaacttctctgtgatgattgcattcaactcacagagttgaaccctcctatggatagagcagtgttgaaactctctttttgtggaatctgcaagtggatatgtggacctctccgaagatgtctttggaaacgggaatatcttcacataaaaactaaacagaagcattctcagaaacttcttggtgatgtttgcattcaaatcccagagttgaaccttcctttgatagttcaggtttgaaacactctttctgtaggatctgcaagtggctatttggaccactctgtggccttcgttcgaaacgggtatatcttcgcataaaatctagacagaagcattctcagaaaatactttgtgatgattgagtttaaatcacagagctgaccattcctttggatggagcaggtttgagacacactttttgtagaatctacaagtggatatttggacctctctgaggatttcgttggaaacgggataactgcacctaactaaacggaagcattctcagaaactgctttgtgatgattgcattcacctcacagagttgaacattcctattgatagagcagtttggaaacactcttgttgtggaatgtgcaagtggagatttggagcgctttgaggcctatggtagtaaagggaatagcttcatagaaaaactagacaggatgcattctcaggaactttttggtgatgtttgtattcaactcccagagttgaactttcctttggaaagagcagctatgaaacactctttttctagaatctgcaagtggacgtttggagggctttgtggtttgtggtggaaaaggaaatatcttcacctaaatactagatagaagcatcctcagaagcttctctgtgatgactgcattcaactcacggagttgaacactccttttgagagcgcagttttgaaactctctttctgtggcatctgcaaggggacatgtagacctctttgaagatttcgttggaaacggaatcatcttcacataaaaactatacagaagcagtctcagaatcttctttgtgatgtttgcattcaaatcccagagttgaactttcctttcaaagttcacgtttgaaacactctttttgcaggatctacaagtggatatttggaccactctgtgtccttcgttcgaaacgggtatatcttcacatgacatctagacagaagctttctcagaaaattctttgggatgattgagttgagcaaacagagctgaacactccttgcgatgtagcagtttagaaacacactttctgcagaatctgcaagtgcatatgtggacctctctgaggaattcgtaggaaacgggataatttcagctgactaaacagaagcattctcagaaccttcttcgtgatgtctgcattcaactcacagtgtggaacctttctttgatagttcaggtttgaaacactctttttgtagaaactgcaagggggtaattgcacttctttgaggcctaccgtagtaaaggaaataacttcctatagaaagaagacagaagcattctcagaaccctcttcgtgatgtttgcattcaactcacagtgctgaacctttctttgatagttcagctttgaaacactcttcttgtagaaactgcaagtggatatttggtcctctctgaggatttcgttggaaacgggataaaccgcacagaactaaacagaagcattctcagaaccttcttcgtgatgtttgcattcaactcacagtgttgaacctttctttgatagttcaggtttgaaacggtctttctgtagaaactgcaagtagatatttggacctctctgaggatttcgttggaaacgggataacccgcacagaactaaaacagaagcattcacagaaaactcttggtgacgactgagtttaactcacagagctgaacattcctttggatggagcagtttcgaaacacactatttgtagaatgtgcaagtggatatttaggcctctctgaggatttcgttggaaacgggataaaccgcacagaactaaacagaagcattctcagaaactactttgtgatgattgcattcaagtcacagagttgaacattccctttgacagagcagtttggaaactctctttgtgtagaatctgcaagtggagatatggaccgctttgaggcctatggtagtaaaggaaatagcttcatataaaagctagacagtagcattctcagaaacttctttgtgatgcttgcattcaactcacagagttgaactttcctttcgagagagaagctttgaaacactctttttccagaatctgcaagtggacatttggagggctttgaggcctgtggtggaaaaggaattatcttcccgtaaaagctagatagaagcattgtcagaaacttctttgtgatgattgcattcaactcacagagttgaaggttccttttcaaacagcagtttccaatcactctttctgtggaatctgcaagtggatatttgggcctctctgaggatttcgttggaaacgggataaaacgcacagaactaaaacagaagcattctcagaaacttctctgtgatgtttgtgttcaactcccagagtttcacattgcttttcatagagtagttctgaaacatgcttttcgtagtgtctacaagtggacatttggagcgctttcaggcctgtggtggaaaacgaattatggtcacataaaaacggagagaagccttcacagaaaattctctgtgatgattgcattcaactcacagagttgaaccctcctatggatagagcagtgttgaaactctctttttgtggaatctgcaagtggctacgtggacctctccgaagatgtctttggaaacgggaatatcttcacataaaaactaaacagaagcattctcagaaacttcttggtgatgtttgcattcaaatcccagagttgaaccttcctttgatagttcaggtttgaaacactctttctgtaggatctgcaagtggctatttggaccactctgtggccttcgttcgaaacgggtatatcttcgcataaaatctagacagaagcattctcagaaaatactttgtgatgattgagtttaaatcacagagctgaacattcctttggatggagcaggtttgagacacactttttgtagaatctacaagtggatatttggacctctctgaggatttcgttggaaacgggataactgcacctaactaaacggaagcattctcagaaactgctttgtgatgattgcattcacctcacagagttgaacattcctattgatagagcagtttggaaacactcttgttgtggaatgtgcaagtggagatttggagcgctttgaggcctgtggtagtaaagggaatagcttcatagaaaaactagacagatgcattctcaggaactttttggtgatgtttgtattcaactcccagagttgaactttcctttggaaagagcagctgtgaaacactctttttctagaatctgcaggtggacgtttggagggctttgtggtttgtggtggaaaaggaaatatcttcacctaaatagtagagagaagcattctcagaagcttctctgtgatgactgcattcaactcacggagttgaacactccttttgagagcgcagttttgaaactctctttctgtggcatctacaaggggacatgaagacctctttgaagatttcgttggaaacggaatcatcttcacataaaaactatacagaagcagtctcagaatcttctttgtgatgtttgcattcaaatcccagagttgaactttcctttcaaagttcacgtttgaaacactctttttgcaggatctacaagtggatatttggaccactctgtgtccttcgttcgaaacgggtatatcttcacatgacatctagacagaagctttctcagaaaattctttggcatgattgagttgaactcacagagctgaacattccttgcgatgtagcagtttagaaacacactttctgcagaagctgcaagtgcatatttggacctctctgaggaattcgttggaaacgggataatttcagctgactaaacagaagcattctcagaaccttcttcgtgatgtctgcattcaactcacagtgtggaacctttctttgatagttcaggtttgaaacactctttttgtagaaactgcaaggggataattgcacttctttgaggcctaccgtagtaaaggaaataacttcctatagaaagaagacagaagcattctcagaaccctcttcgtgatgtttgcattcaactcacagtgctgaacctttctttgatagttcagctttgaaacactctttttgtagaaactgcaagtggatatttggtcctctctgagcatttcgttggaaacgggataaactgcacagaactaaacagaagcattctcagaaccttcttcgtgatgtttgcattcaactcacagtgttgaacctttctttgatagttcaggtttgaaacggtctttctgtagaaactgcaagtagatatttggacctctctgaggatttcgttggaaacgggataacccgcacagaactaaaacagaagcattcacagaaaactcttggtgacgactgagtttaactcacagagctgaacattcctttggatggagcagtttcgaaacacactatttgtagaatgtgcaagtggatatttaggcctctctgaggatttcgttggaaacgggataaaccgcacagaactaaacagaagcattctcagaaactactttgtgatgattgcattcaagtcacagagttgaacattccctttgagagagcagtttggaaactctctttgtgtagaatctgcaagtggagatatggaccgctttgaggcctatggtagtaaaggaaatagcttcatataaaagctagacagtagcattctcagaaacttctttgtgatgcttgcattcaactcacagagttgaactttcctttcgagagagaagctttgaaacactctttttccagaatgtgcaagtggacatttggagggctttgaggcctgtggtggaaaaggaattatcttcccgtaaaagctagatagaatcattgccagaaacttctttgtgatgattgcattcaactcacagagttgaaggttccttttcaaacagcagtttccaatcactctttctgtggaatctgcaagtggatatttcgacctctttgaagatttcgttggaaacgggagaatcttcacagaaaagctaaacagaagcattctcagaaacttctctgtgatgtttgtgttcaactcccagagtttcacattgcttttcatagagtagttctgaaacatgcttttcgtagtgtctgcaagtggacatttggagcgctttcaggcctgtggtggaaaacgaattatggtcacataaaaactggagagaagccttctcagaaacttctctgtgatgattgcattcaactcacagagttgaaccctcctatggatagagcagtgttgaaactctctttttgtggaatctgcaagtggatatgtggacctctccgaagatgtctttggaaacgggaatatcttcacataaaaactaaacagaagcattctcagaaacttcttggtgatgtttgcattcaaatcccagagttgaaccttcctttgatagttcaggtttgaaacactctttctgtaggatctgcaagtggctatttggaccactctgtggccttcgttcgaaacgggtatatcttcgcataaaatctagacagaagcattctcagaaaatactttgtgatgattgagtttaaatcacagagctgaccattcctttggatggagcaggtttgagacacactttttgtagaatctacaagtggatatttggacctctctgaggatttcgttggaaacgggataactgcacctaactaaacgggaagcattctcagaaactgctttgtgatgattgcattcacctcacagagttgaacattcctattgatagagcagtttggaaacactcttgttgtggaatgtgcaagtggagatttggagcgctttgaggcctatggtagtaaagggaatagcttcatagaaaaactagacagatgcattctcaggaactttttggtgatgtttgtattcaactcccagagttgaactttcctttggaaagagcagctatgaaacactctttttctagaatctgcaagtggacgtttggagggctttgtggtttgtggtggaaaaggaaatatcttcacctaaatactagatagaagcattctcagaagcttctctgtgatgactgcattcaactcacggagttgaacactccttttgagagcgtagttttgaaactctctttctgtggcatctgcaaggggacatgtagacctctttgaagatttcgttggaaacggaatcatcttcacataaaaactatacagaagcagtctcagaatcttctttgtgatgtttgcattcaaatcccagagttgaacttgcctttcaaagttcacgtttgaaacactctttttgcaggatctacaagtggatatttggaccactctgtgtccttcgttcgaaacgggtatatcttcacatgacatctagacagaagctttctcagaaaattctttgggatgattgagtggaactcacagagctgaacattccttgcgatgtagcagtttagaaacacactttctgcagaatctgcaagtgcatatttggacctctctgaggaattcgttggaaacggggataatttcagctgactaaacagaagcattctcagaaccttcttcgtgatgtctgcattcaactcacagtgtggaacctttctttgatagttcaggtttgaaacactctttttgtagaaactgcaaggggataattgcacttctttgaggcctaccgtagtaaaggaaataacttcctatagaaagaagacagaagaattctcagagccctcttcgtgatgtttgcattcaactcacagtgctgaacctttctttgatagtgcagctttgaaacactctttttgtagaaactgcaagtggatgtttggtcctctctgaggatttcgttggaaacgggataaaccgcacagaactaaaacagaagcattctcagaaccttcttcgtgatgtttgcattcaactcacagtgttgaacctttctttgatagttcaggtttgaaacggtctttctgtagaaactgcaagtagatatttggacctctctgaggatttcgttggaaacgggataacccgcacagaactaaaacagaagcattcacagaaaactcttggtgacgactgagtttaactcacagagctgaacattcctttggatggagcagtttcgaaacacactatttgtagaatgtgcaagtggatatttgggcctctctgaggatttcgttggaaacgggataaaccgcacagaactaaacagaagcattctcagaaactactttgtgatgattgcattcaagtcacagagttgaacattccctttgacagagcagtttggaaactctctttgtgtagaatctgcaagtggagatatggaccgctttgaggcctatggtagtaaaggaaatagcttcatataaaagctagacagtagcattctcagaaacttctttgtgatgcttgcattcaactcacagagttgaactttcctttcgagagagaagctttgaaacactctttttccagaatctgcaagtggacatttggagggctttgaggcctgtggtggaaaaggaattatcttcccgtaaaagctagatagaagcattgtcagaaacttctttgtgatgattgcattcaactcacagagttgaaggttccttttcaaacagcagtttccaatcactctttctgtggaatctgcaagtggatatttcgacctctttgaagatttcgttggaaacgggagaatcttcacagaaaagctaaacagaagcattctcagaaacttctctgtgatgtttgtgttcaactcccagagtttcacgttgcttttcatagagtagttctgaaacatgcttttcgtagtgtctgcaagtggacatatggagcgctttcaggcctgtggtggaaaacgaattatggtcacataaaaactggagagaagccttctcagaaacttctctgtgatgattgcattcaactcacagagttgaaccctcctatggatagagcagtgttgaaactctctttttgtggaatctgcaagtggatatgtggacctctccgaagatgtctttggaaacgggaatatcttcacataaaaactaaacagaagcattctcagaaacttcttggtgatgtttgcattcaaatcccagagttgaaccttcctttgatagttcaggtttgaaacactctttctgtaggatctgcaagtggctatttggaccactctgtggccttcgttcgaaacgggtatatcttcgcataaaatctagacagaagcattctcagaaaatactttgtgatgattgagtttaactcacagagctgaacattcctttggatggagcaggtttgagacacactttttgtagaatctacaagtggatatttggacctctctgaggatttcgttggaaacgggataactgcacctaactaaacggaagcattctcagaaactgctttgtgatgattgcattcacctcacagagttgaacattcctattgatagagcagtttggaaacactcttgttgtggaatgtgcaagtggagatttggagcgctttgaggcctatggtagtaaagggaatagcttcatagaaaaactagacagatgcattctcaggaactttttggtgatgtttgtattcaactcccagagttgaactttcctttggaaagagcagctatgaaacactctttttctagaatctgcaagtggacgtttggagggctttgtggtttgtggtggaaaaggaaatatcttcacctaaatactagatagaagcattctcagaagcttctctgtgatgactgcattcaactcacggagttgaacactccttttgagagcgcagttttgaaactctctttctgtggcatctgcaaggggacatgtagacctctttgaagatttcgttggaaacggaatcatcttcacataaaaactatacagaagcagtctcagaatcttctttgtgatgtttgcattcaaatcccagagttgaacttgcctttcaaagttcacgtttgaaacactctttttgcaggatctacaagtggatatttggaccactctgtgtccttcgttcgaaacgggtatatcttcacatgacatctagacagaagctttctcagaaaattctttgggatgattgagtggaactcacagagctgaacattccttgcgatgtagcagtttagaaacacactttctgcagaatctgcaagtgcatatttggacctctccgaggaattcgttggaaacgggataatttcagctgactaaacagaagcattctcagaaccttcttcgtgatgtctgcattcaactcacagtgtggaacctttctttgatagttcaggtttgaaacactctttttgtagaaactgcaaggggataattgcacttctttgaggcctaccgtagtaaaggaaataacttcctatagagagaagacagaagcatcctcagaaccttcttcgtgatgtttgcattcacctcacagtgctgaacctttctttgatagttcagctttgaaacactctttttgtagaaactgcaagtggatatttggtcctctctgaggatttcgttggaaacgggataaaccgcacggaactaaaacagaagcattctcagaaccttcttcgtgatgtttgcattcaactcacagtgttgaacctttctttgatagttcaggtttgaaacggtctttctgtagaaactgcaagtagatatttggacctctctgaggatttcgttggaaacgggataacccgcacagaactaaaacagaagcattcacagaaaactcttggtgacgactgagtttaactcacagagctgaacattcctttggatggagcagtttcaaaacacactatttgtagaatctgcaagtggatatgtgggcctctctgaggatttcgttggaaacgggataaaccgcacagaactaaaacagaagcattctcagaaactactttgtgatgattgcattcaagtcacagagttgaacattccctttgacagagcagtttggaaactctctttgtgtagaatctgcaagtggagatatggaccgctttgaggcctatggtagtaaaggaaatagcttcatataaaagctagacagtagcattctcagaaacttctttgtgatgcttgcattcaactcacagagttgaactttcctttcgagagagaagctttgaaacactctttttccagaatgtgcaagtggacatttggggagctttgaggcctggggtggaaaaggaattatcttcccgtaaaagctagatagaagcattgtcagaaacttctttgtgatgattgcattcaactcacagagttgaaggttccttttcaaacagcagtttccaatcactctttctgtggaatctgcaagtggatatttgggcctctctgaggatttcgttggaaacgggataaaacgcacagaactaaaacagaagcattctcagaaacttctctgtgatgtttgtgttcaactcccagagtttcacgttgcttttcatagagtagttctgaaacatgcttttcgtagtgtctgcaagtggacatttggagcgctttcaggcctgtggtggaaaacgaattatggtcacataaaaactggagagaagccttctcagaaacttctctgtgatgattgcattcaactcacagagttgaaccctcctatggatagagcagtgttgaaactctctttttgtggaatctgcaagtggatatgtggacctctccgaagatgtctttggaaacgggaatatcttcacataaaaactaaacagaagcattctcagaaacttcttggtgatgtttgcattcaaatcccagagttgaaccttcctttgagagttcaggtttgaaacactctttttgtaggatctgaaagtggatatttggaccactctgtggccttcgttcgaaacgggtacatcttcgaataaaatctagacagaagcattctcagaaaatactttgtgatgattgagtttaaatcacagagctgaccattcctttggatggagcaggtttgagacacactttttgtagaatctacaagtggatatttggacctactcctgaggatttcgttggaaacgggataactgcacctaactaaacggaagcattctcagaaacggctttgtgatgattgcattcacctcacagagttgaacattcctattgatagagcagtttggaaacactcctgttgtggaatgtgcaagtggagatttggagcgctttgaggcctatggtagtaaagggaataacttcatagaaaaactagacagatgcattctcaggaactttttggtgatgtttatattcaactcccagagttgaactttcctttggaaagagcagctatgaaacactctttttctagaatctgcaagtggacgtttggagggctttgtggtttgtggtggaaaaggaaatatcttcacctaaatactagacagaagcattctcagaagcttctctgtgatgactgcatttaactcacggagttgaacactccttttgagagcgcagttttgaaactctctttctgtggcatctgcaaggggacatgtagacctctttgaagatttcgttggaaacggaatcatcttcacataaaaactatacagaagcagtctcagaatcttctttgtgatgtttgcattcaaatcccagagttgaactttcctttcaaagttcacgtttgaaacactctttttgcaggatctacaagtggatatttggaccactctgtgtccttcgttcgaaacgggtatatcttcacacgacatctagacagaagctttctcagaaaattctttgggatgattgagtggaactcacagagctgaacattccttgcgatgtagcagtttagaaacacactttctgcagaatctgcaagtgcatatttggacctctctgaggaattcgttggaaacgggataatttcagctgactaaacagaagcattctcagaaccttcttcgtgatgtctgcattcaactcacagtgtggaacctttctttgatagttcaggtttgaaacactctttttgtagaaactgcaaggggataattgcacttctttgaggcctaccgtagtaaaggaaataacttcctatagaaagaagacagaagcattctcagaaccctcttcgtgatgtttgcattcaactcacagtgctgaacctttctttgatagttcagctttgaaacactcttcttgtagaaactgcaagtggatatttggtcctctctgaggatttcgttggaaacgggataaaccgcacagaactaaacagaagcattctcagaaccttcttcgtgatgtttgcattcaactcacagtgttgaacctttctttgatagttcaggtttgaaacggtctttctgtagaaactgcaagtagatatttggacctctctgaggatttcgttggaaacgggataacccgcacagaactaaaacagaagcattcacagaaaactcttggtgacgactgagtttaactcacagagctgaacattcctttggatggagcagtttcgaaacacactatttgtagaatctgcaagtggatatttgggcctctctgaggatttcgttggaaacgggataaaccgcacagaactaaaacagaagcattctcagaaactactttgtgatgattgcattcaagtcacagagttgaacattccctttgacagagcagtttggaaactctctttgtgtagaatctgcaagtggagatatggaccgctttgaggcctatggtagtaaaggaaatagcttcatataaaagctagacagtagcattctcagaaacttctttgtgatgcttgcattcaactcacagagttgaactttcctttcgagagagaagctttgaaacactctttttccagaatctgcaagtggacatttggagggctttgaggcctgtggtggaaaaggaattatcttcccgtaaaagctagatagaagcattgtcagaaacttctttgtgatgattgcattcaactcacagagttgaaggttccttttcaaacagcagtttccaatcactctttctgtggaatctgcaagtggatatttcgacctctttgaagatttcgttggaaacgggagaatcttcacagaaaagctaaacagaagcattctcagaaacttctctgtgatgtttgtgttcaactcccagagtttcacattgcttttcatagagtagttctgaaacatgcttttcgtagtgtctgcaagtggacatttggagcgctttcaggcctgtggtggaaaacgaattatggtcccataaaaactggagagaagccttctcagaaacttctctgtgatgattgcattcaactcacagatttgaaccctcctatggatagagcattgttgaaactctctttttgtggaatctgcaagtggatatgtggacctctccgaagatgtctttggaaacgggaatatcttcacataaaaactaaacagaagcattctcagaaacttcttggtgatgtttgcattcaaatcccagagttgaaccttcctttgatagttcaggtttgaaacactctttctgtaggatctgcaagtggctatttggaccactctgtggccttcgttcgaaacgggtatatcttcgcataaaatctagacagaagcattctcagaaaatactttgtgatgattgagtttaactcacagagctgaacattcctttggatggagcaggtttgagacacactttttgtagaatctacaagtggatatttggacctctctgaggatttcgttggaaacgcgataactgcacctaactaaacggaagcattctcagaaactgctttgtgatgattgcattcacctcacagagttgaacattcctattgatagagcagtttggaaacactcttgttgtggaatgtgcaagtggagatttggagcgctttgaggcctatggtagtaaagggaatagcttcatagaaaaactagacagatgcattctcagaaactttttggtgatgtttgtattcaactcccagagttgaactttcctttggaaagagcagctatgaaaccctctttttctagaatctgcaagtggacgtttggagggctttgtggtttgtggtggaaaaggaaatatcttcacctaaatactagatagaagcattctcagaagcttctctgtgatgactgcattcaactcacggagttgaacactccttttgagagcgcagttttgaaactctctttctgtggcatctgcaaggggacatgtagacctctttgaagatttcgttggaaacggaatcatcttcacatcaaaactatacagaagcagtctcagaatcttctttgtgatgtttgcattcaaatcccagagttgaactttcctttcaaagttcacgtttgaaacactctttttgcaggatctacaagtggatatttggaccactctgtgtccttcgttcgaaacgggtatatcttcacatgacatctagacagagtaagctttctcagaaaattctttgggatgattgagttgaactcacagagctgaacattccttgcgatggagcagtttagaaacacactttctgcagaatctgcaagtgcatatttggacctctctgaggaattcgttggaaacgggataatttcagctgactaaacagaagcattctcagaaccttcttcgtgatgtctgcattcaactcacagtgtggaacctttatttgatagttcaggtttgaaacactctttttgtagaaactgcaaggggataattgcacttctttgaggcctaccatagtaaaggatataacttcctataaaaagaagacagaagcattctcagaaccctcttcgtgatgtttgcattcaactcacagtgctgaacctttctttgatagttcagctttgaaacactctttttgtagaaactgcaagtggatatttggtcctctctgaggatttcgttggaaacgggataaaccgcacagaactaaacagaagcattcacagtaaaactcttggtgacgactgagtttaactcacagagctgaacattcctttggatggagcagtttcgaaacacactatttgtagaatctgcaagtggatatttgggcctctctgaggatttcgttggaaacgggataaaccgcacagaactaaaacagaagcattctcagaaactactttgtgatgattgcattcaagtcacagagttgaacattccctttgacagagcagtttggaaactctctttgtgtagaatctgcaagtggagatatggaccgctttgaggcctatggtagtaaaggaaatagcttcatataaaagctagacagtagcattctcagaaaacttctttgtgatgcttgcattcaactcacagagttgaactttcctttcgagagagaagctttgaaacactctttttccagaatgtgcaagtggacatttggggagctttgaggcctgtggtggaaaaggaattatcttcccgtaaaagctagatagaagcattgtcagaaacttctttgtgatgattgcattcaactcacagagttgaaggttccttttcaaagagcagtttccaatcactctttctgtggaatctgcaagtggatatttcgacctctttgaagatttcgttggaaacgggagaatcttcacagaaaagctaaagagaagcattctcagaaacttctctgtgatgtttgtgttcaactcccagagtttcacgttgcttctcatagagtagttctgaaacatgcttttcgtagtgtctgcaagtggacatttggagcgctttcaggcctgtggtggaaaacgaattatggtcacataaaaactggagagaagccttctcagaaacttctctgtgatgattgcattcaactcacagagttgaaccctctatggatagagcagtgttgaaactctctttttgtggaatctgcaagtggatatgtggacctctccgaagatgtctttggaaacgggaatatcttcacataaaaactaaacagaagcattctcagaaacttcttggtgatgtttgcattcaaatcccagagttgaaccttcctttgatagttcaggtttgaaacactctttctgtaggatctgcaagtggctatttggaccactctgtggccttcgttcgaaacgggtatatcttcgcataaaatctagacagaagcattctcagaaaatactttgtgatgattgagtttaactcacagagctgaacattcctttggatggagcaggtttgagacacactttttgtagaatctacaagtggatatttggacctctctgaggatttcgttggaaacgggataactgcacctaactaaacgggaagcattctcagaaactgctttgtgatgattgcattcacctcacagagttgaacattcctattgatagagcagtttggaaacactcttgttgtggaatgtgcaagtggagatttggagcgctttgaggcctatggtagtaaagggaatagcttcatagaaaaactagacagatgcattctcaggaactttttggtgatgtttgtattcaactcccagagttgaactttcctttggaaagagcagctatgaaacactctttttctagaatctgcaagtggacgtttggagggctttgtggtttgtggtggaaaaggaaatatcttcacctaaatactagatagaagcattctcagaagcttctctgtgatgactgcattcaactcacggagttgaacactccttttgagagcgcagttttgaaactctctttctgtggcatctgcaaggggacatgtagacctgtttgaagatttcgttggaaacggaatcatcttcacataaaaactatacagaagcagtctcagaatcttctttgtgatgtttgcattcgaatcccagagttgaactttcctttcaaagttcacgtttgaaacactctttttgcaggatctacaagtggatatttggaccactctgtgtccttcgttcgaaacgggtatatcttcacatgacatctagacagaagctttctcagaaaattctttgggatgattgaggtgagcaaacagagctgaacattccttgcgatgtagcagtttagaaacacactttctgcagaatctgcaagtgcatatgtggacctctctgaggaattcgttggaaacgggataatttcagctgactaaacagaagcattctcagaaccttcttcgtgatgtctgcattcaactcacagtgtggaacctttctttgatagttcaggtttgaaacactctttttgtagaaactgcaaggggataattgcacttctttgaggcctaccgtagtaaaggaaataacttcctataaaaagaagacagaagcattctcagaaccctcttcgtgatgtttgcattcaactcacagtgctgaacctttctttgatagttcagctttgaaacactcttcttgtagaaactgcaagtggatatttggtcctctctgaggatttcgttggaaacgggataaaccgcacagaactaaacagaagcattctcagaaccttcttcgtgatgtttgcattcaactcacagtgttgaacctttctttgatagttcaggtttgaaacggtctttctgtagaaactgcaagtaggtatttggacctctctgaggatttcgttggaaacgggataaaccgcagagaactaaaacagaagcattcacagaaaactcttggtgacgactgagtttaactcacagagctgaacattcctttggatggagcagtttcgaaacacactatttgtagaatgtgcaagtggatatttgggcctctctgaggatttcgttggaaacgggataaaccgcacagaactaaacagaagcattctcagaaactactttgtgatgattgcattcaagtcacagagttgaacattccctttgacagagcagtttggaaactctctttgtgtagaatctgcaagtggagatatggaccgctttgaggcctatggtagtaaaggaaatagcttcatataaaagctagacagtagcattctcagaaacttctttgtgatgcttgcattcaactcacagagttgaactttcctttcgagagagaagctttgaaacactcttttccagaatctgcaagtggacatttggagggctttgaggcctgtggtggaaaaggaattatcttcccgtaaaagctagacagaagcattgtcagaaacttctttgtgatgattgcattcaactcacagagttgaaggttccttttcaaacagcagtttccaatcactctttctgtggaatctgcaagtggatatttgggcctctctgaggatttcgttggaaacgggataaaacgcacagaactaaaacagaagcattctcagaaacttctctgtgatgtttgtgttcaactcccagagtttcacgttgcttttcatagagtagttctgaaacatgcttttcgtagtgtctgcaagtggacatttggagcgctttcaggcctgtggtggaaaacgaattatggtcacataaaaactggagagaagcctttctcagaaacttctctgtgatgattgcattcaactcacagagttgaaccctcctatggatagagcagtgttgaaactctctttttgtggaatctgcaagcggatatgtggacctctccgaagatgtctttggcaacgggaatatcttcacataaaaactaaacagaagcattctcagaaacttcttggtgatgtttgcattcaaatcccagagttgaaccttcctttgatagttcaggtttgcaacactctttttgtaggatctgcaagtggatatttggaccactctgtggccttagttcgaaacgggtacatcttcgcataaaatctagacagaagcattctcagaaaatactttgtgatgattgagtttaactcacagagctgaacattcctttggatggagcaggtttgagacacactttttgtagaatctacaagtggatatttggacctctctgaggatttcgttggaaacgggataactgcacctaactaaacggaagcattctcagaaactgctttgtgatgattgcattcacctcacagagttgaacattccttttgatagagcagtatggaaacactcttgttgtggaatgtgcaagtggagatttggagcgctttgaggcctatggtagtaaagggaatagcttcatagaaaaactagacagatgcattctcaggaactttttggtgatgtttgtattcaactcccagagttgaactttcctttggaaagagcagctatgaaacactctttttctagaatctgcaagtggacttttggagggctttgtggtttgtggtggaaaaggaaatatcttcacctaaatactagatagaagcattctcagaagcttctctgtgatgactgcattcaactcacggagttgaacactccttttgagagcgcagttttgaaactctctttctgtggcatctgcaaggggacatgtagacctctttgaagatttgattggaaacggaatcatcttcacataaaaactatacagaagcagtctcagaatcttctttgtgatgtttgcattcaaatcccagagttgaactttcctttcaaagttcacgtttgaaacactctttttgcacgatctacaagtggatatttggaccactctgtgtccttcgttcgaaacgggtatatcttcacatgacatctacacagaagctttctcagaaaattctttgggatgattgagtggaactcacagagctgaacattccttgcgatgtagcagtttagaaacacactttctgcagaatctgcaagtgcatatttggacctctctgaggaattcgttggaaacgggataatttcagctgactaaacagaagcattctcagaaccttcttcgtgatgtctgcattcaactcacagtgtggaacctttctttgatagttcaggtttgaaacactctttttgtagaaactgcaaggggataattgcacttctttgaggcctaccgtagtaaaggaaataacttcctatagaaagaagacagaagaattctcagagccctcttcgtgatgtttgcattcaactcacagtgctgaacctttctttgatagtgcagctttgaaacactctttttgtagaaactgcaagtggatgtttggtcctctctgaggatttcgttggaaacgggataaaccgcacagaactaaaacagaagcattctcagaaccttcttcgtgatgtttgcattcaactcacagtgttgaacctttctttgatagttcaggttggaaacggtctttctgtagaaactgcaagtagatatttggacctctctgaggatttcgttggaaacgggataaaccgcacagaactaaaacagaagcattcacagaaaacccttggtgacgactgagtttaactcacagagctgaacattcctttggatggagcagtttcgaaacacactatttgtagaatgtgcaagtggatatttgggcctctctgaggatttcgttggaaacgggataaaccgcacagaactaaacagaagcattctcagaaactactttgtgatgattgcattcaagtcacagagttgaacattccctttgacagagcagtttggaaactctctttgtgtagaatctgcaagtggagatatggaccgctttgaggcctatggtagtaaaggaaatagcttcatataaaagctagacagtagcattctcagaaacttctttgtgatgcttgcattcaactcacagagttgaactttcctttcgagagagaagctttgaaacactctttttccagaatctgcaagtggacatttggagggctttgaggcctgtggtggaaaaggaattatcttcccgtaaaagctagatagaagcattgtcagaaacttctttgtgatgattgcattcaactcacagagttgaaggttccttttcaaagagcagtttccaatcactctttctgtggaatctgcaagtggatatttggacctattttgaagatttcgttggaaacgggagaatcttcacaggaaagctaaacagaagcattctcagaaacttctctgtgatgtttgtgttcaactcccagagtttcacgttgcttttcatagagtagttctgaaacatgcttttcgtagtgtctgcaagtggacatttggagcgctttcaggcctgtggtggaaaacgaattatggtcacataaaaactggagagaagccttctcagaaacttctctgtgatgattgcattcaactcacagagttgaaccctcctatggatagagcagtgttgaaactctctttttgtggaacctgcaagtggatatgtggacctctccgaagatgtctttggaaacgggaatatcttcacataaaaactaaacagaagcattctcagaaacttcttggtgatgtttgcattcaaatcccagagttgaaccttcctttgatagttcaggtttgaaacactctttctgtaggatctgcaagtggctatttggaccactctgtggccttcgttcgaaacgggtatatcttcgcataaaatctagacagaagcattctcagaaaatactttgtgatgattgagttgaactcacagagctgaacattcctttggatggagcaggtttgagacacactttttgtagaatctacaagtggatatttggacctctctgaggatttcgttggaaacgggataactgcacctaactaaacggaagcattctcagaaactgctttgtgatgattgcattcacctcacagagttgaacattcctattgatagagcagtttggaaacactcttgttgtggaatgtgcaagtggagatttggagcgctttgaggcctatggtagtaaagggaatagcttcatagaaaaactagacagatgcattctcaggaactttttggtgatgtttgtattcaactcccagagttgaactttcctttggaaagagcagctatgaaacactctttttctagaatctgcaagtggacgtttggagggctttgtggtttgtggtggaaaaggaaatatcttcacctaaatactagatagaagcattctcagaagcttctctgtgatgactgcattcaactcacggagttgaacactccttttgagagcgcagttttgaaactctgtttctgtggcatctgcaaggggacatgtagacctctttgaagatttcgttggaaacggaatcatcttcacataaaaactatacagaagcagtctcagaatcttctttgtggtgtttgcattcaaatcccagagttgaactttcctttcaaagttcacgtttgaaacactctttttgcaggatctacaagtggatatttggaccactgctgtgtccttcgttcgaaacgggtatatcttcacatgacatctagacagaagctttctcagaaaattctttgggatgattgagtggaactcacagagctgaacattccttgcgatgtagcagtttagaaacacactttctgcagaatctgcaagtgcatatttggacctctctgaggaattcgttggaaacgggataatttcagctgactaaacagaagcattctcagaaccttcttcgtgatgtctgcattcaactcacagtgtggaacctttctttgatagttcaggtttgaaacactctttttgtagaaactgcaaggggataattgccctctttgaggagtaccgtagtaaaggaaataacttcctataaaaagaagacagaagcattctcagaacaatcttcgtgatgtttgcattcaactcacagtgctgaacctttctttgatagttcagctttgaaacactctttttgtagaaactgcaagtggatatttggtcctctctgaggatttcgttggaaaagggataaaacgcacagaactaaacagaagcattctcagaaccttcttcgtgatgtttgcattcaactcacagtgttgaacctttctttgatagttcaggtttgaaacggtctttctgtagaaactgcaagtagatatttggacctctctgaggatttcgttggaaacgggataaaccgcacagaactaaaacagaagcattcacagaaaactcttggtgacgactgagtttaactcacagagctgaacattcctttggatggagcagtttcgaaacacactatttgtagaatctgcaagtggatatttgggcctctctgaggatttcgttggaaacgggataaaacgcacagaactaaaacagaagcattctcagaaactactttgtgatgattgcattcaagtcacagagttgaacattccctttgacagagcagtttggaaactctctttgtgtagaatctgcaagtggagatatggaccgctttgaggcctatggtagtaaaggaaatagcttcatataaaagctagacagtagcattctcagaaacttctttgtgatgcttgcattcaactcacagagttgaactttcctttcgagagagaagctttgaaacactctttttccagaatgtgcaagtggacatttggggagctttgaggcctgtggtggaaaaggaattatcttcccgtaaaagctagatagaagcattgtcagaaacttctttgtgatgattgcattcaactcacagagttgaaggttccttttcaaagagcagtttccaatcactctttgtgtggaatctgcaagtggatatttggacctattttgaagatttcgttggaaacgggagaatcttcacaggaaagctaaacagaagcattctcagaaacttctctgtgatgtttgtgttcaactcccagagtttcacgttgcttttcatagagtagttctgaaacatgcttttcgtagtgtctgcaagtggacatttggagcgctttcaggcctgtggtggaaaacgaattatggtcacataaaaactggagagaagccttctcagaaacttctctgtgatgattgcattcaactcacagagttgaaccctcctatggatagagcagtgttgaaactctctttttgtggaatctgcaagtggatatgtggacctctccgaagatgtctttggaaacgggaatatcttcacataaaaactaaacagaagcattctcagaaacttcttggtgatgtttgcattcaaatcccagagttgaaccttcctttgatagttcaggtttgaaacactctttttgtaggatctgcaagtggatatttggaccactctgtggccttcgttcgaaacgggtatatcttcgcataaaatctagacagaagcattctcagaaaatactttgtgatgattgagtttaactcacagagctgaacattcctttggatggagcaggtttgagacacactttttgtagaatctacaagtggatatttggacctctctgaggatttcgttggaaacgggataactgcacctaactaaacggaagcattctcagaaactgctttgtgatgattgcattcacctcacagagttgaacattcctattgatagagcagtttggaaacactcttgttgtggaatgtgcaagtggagatttggagcgctttgaggcctatggtagtaaagggaatagcttcatagaaaaactagacagatgcattctcaggaactttttggtgatgtttgtattcaactcccagagttgaactttcctttggaaagagcagctatgaaacactctttttctagaatctgcaagtggacgtttggagggctttgtggtttgtggtggaaaaggaaatatcttcacctaaatactagatagaagcattctcagaagcttctctgtgatgactgcattcaactcacggagttgaacactccttttgagagcgcagttttgaaactctctttctgtggcatctgcaaggggacatgtagacctctttgaagatttcgttggaaacggaatcatcttcacataaaaactatacagaagcagtctcagaatcttctttgtgatgtttgcattcaaatcccagagttgaactttcctttcaaagttcacgtttgaaacactctttttgcaggatctacaagtggatatttggaccactctgtgtccttcgttcgaaacgggtatatcttcacatgacatctagacagaagctttctcagaaaattctttgggatgattgagtggaactcacagagctgaacattccttgcgatgtagcagtttagaaacacactttctgcagaatctgcaagtgcatatttggacctctctgaggaattcgttggaaacgggataatttcagctgactaaacagaagcattctcagaaccttcttcgtgatgtctgcattcaactcacagtgtggaacctttctttgatagttcaggtttgaaacactctttttgtagaaactgcaaggggataattgcacttctttgaggcctaccgtagtaaaggaaataacttcctatagaaagaagacagaagcattctcagaaccctcttcgtgatgtttgcattcaactcacaacgatgaaactttctttgatagttcagctttgaaacactcttcttgtagaaactgcaagtggatatttggtcctctctgaggatttcgttggaaacgggataaaccgcacagaactaaacagaagcattctcagaaccttcttcgtgatgtttgcattcaactcacagtgttgaacctttctttgatagttcaggtttgaaacggtctttctgtagaaactgcaagaagatatttggacctctctgaggatttcgttggaaacgggataaaccgcacagaactaaaacagaagcattcacagaaaactcttggtgacgactgagtttaactcacagagctgaacatccctttggatggagcagtttcgaaacacactatttgtagaatgtgcaagtggatattagggcctctctgaggatttcgttggaaacgggataaaccgcacagaactaaacagaagcattctcagaaactactttgtgatgattgcattcaagtcacagagttgaacattccctttgacagagcagtttggaaactctctttgtgtagaatctgcaagtggagatatggaccgctttgaggcctatggtagtaaaggaaatagcttcatataaaagctagacagtagcattctcagaaacttctttgtgatgcttgcattcaactcacagagttgaactttcctttcgagagagaagctttgaaacactctttttccagaatctgcaagtggacatttggagggctttgaggcctgtggtggaaaaggaattatcttcccgtaaaagctagatagaagcattgtcagaaacttctttgtgatgattgcattcaactcacagagttgaaggttccttttcaaagagcagtttccaatcactctttctgtggaatctgcaagtggatatttggacctattttgaagatttcgttggaaacgggagaatcttcacaggaaagctaaacagaagcattctcagaaacttctctgtgatgtttgtgttcaactcccagagtttcacattgcttttcatagagtagttctgaaacatgcttttcgtagtgtctgcaagtggacatttggagcgctttcaggcctgtggtggaaaacgaattatggtcacataaaaactggagagaagccttctcagaaacttctctgtgatgattgcattcaactcacagagttgaaccctcctatggatagagcagtgttgaaactctctttttgtggaatctgcaagtggatatgtggacctctccgaagatgtctttggaaacgggaatatcttcacataaaaactaaacagaagcattctcagaaacttcttggtgatgtttgcattcaaatcccagagttgaaccttcctttgatagttcaggtttgaaacactctttctgtaggatctgcaagtggctatttggaccactctgtggccttcgttcgaaacgggtatatcttcgcataaaatctagacagaagcattctcagaaaatactttgtgatgattgagtttaactcacagagctgaacattcctttggatggagcaggtttgagacacactttttgtagaatctacaagtggatatttggacctctctgaggatttcgttggaaacgggataactgcacctaactaaacggaagcattctcagaaactgctttgtgatgattgcattcacctcacagagttgaacattcctattgatagagcagtttggaaacactcttgttgtggaatgtgcaagtggagatttggagcgctttgaggcctatggtagtaaagggaatagcttcatagaaaaactagacagatgcattctcaggaactttttggtgatgtttgtattcaactcccagagttgaactttcctttggaaagagcagctatgaaacactctttttctagaatctgcaagtggacgtttggagggctttgtggtttgtggtggaaaaggaaatatctacacctaaatactagagagaagcattctcagaagcttctctgtgatgactgcattcaactcacggagttgaacactccttttgagagcgcagttttgaaactccctttctgtggcatctgcaaggggacatgtagacctctttgaagatttcgttggaaacggaatcatcttcacataaaaactatacagaagcagtctcagaatcttctttgtgatgtttgcattcaaatccccgagttgaactttcctttcaaagttcacgtttgaaacactctttttgcaggatctacaagtggatatttggaccactctgtgtccttcgttcgaaacgggtatatcttcacatgacatctagacagaagctttctcagaaaattctttgggatgattgagttgaactcacagagctgagcattccttgcgatgtagcagtttagaaacacactttctgcagaatctgcaagtgcgtatttggacctctgtgaggaattcgttagaaacgggataatttcagctgactaaacagaagcattctcagaaccttcttcgtgatgtctgcattcaactcacagtgtggaacctttctttgatagttcaggtttgaatcactctttttgtagaaactgcaaggggataattgcacttctttgaggcctaccgtagtaaaggaaataacttcctataaaaagaagacagaagcattctcagaaccctcttcgtgatgtttgcattcaactcacggtgctgaacctttctttgatagttcagctttgaaacactctttttgtagaaactgcaagtggatatttggtcctctctgaggatttcgttggaaacgggataaaccgcacagaactaaacagaagcattctcagaaccttcttcgtgatgtttgcattcaactcacagtgttgaacctttctttgatagttcagctttgaaacactctttttgtagaaactgcaagtggatatttggtcctctctgagtatttcgttggaaacgggataaaccgcacagaactaaacagaagcattcacagaaaactcttggtgacgactgagtttaactcacagagctgaacattcctttggatggagccgtttcgaaacacactatttctagaacgtgcaaatggatatttgggcctctctgcggatttcgttggaaaagggataaaccgcacagaactaaacagaagcattctcagaaactactttgtgatgattgcattcaagtcacagagttgaacattccctttgacagagcagtttggaaactctctttgtgtagaatctgcaagtggagatatggaccgctttgaggcctatggtagtaaaggaaatagcttcatataaaagctagacagtagcattctcagaaacttctttgtgatgcttgcattcaactcacagagttgaactttcctttcgagagagaagctttgaaacactctttttccagaatctgcaagtggacatttggagggctttgaggcctgtggtggaaaaggaattatcttcccgtaaaagctagatagaagcattgtcagaaacttctttgtgatgattgcattcaactcacagagatgaaggttcctttacaaacagcagtttccaaacactctttctgtggaatctgcaagtggatatttggacctctttgaagatttcgttggaaacgggagaatcttcacagaaaagctaaacagaagcattctcagaaacttctctgtgatgtttgtgttcaactcccagagtttcacattgcttctcatagagtagttctgaaacatgcttttcgtagtgtctgcaagtggacatttggagcgctttcaggcctgtggtggaaaacgaattatggtcacataaaaactggagagaagccttctcagaaacttctctgtgatgattgcattcaactcacagagttgaaccctcctatggatagagcagtgttgaaactctctttttgtggaatctgcaagtggatatgtggacctctccgaagatgtctttggaaacgggactatcttcacataaaaactaaacagaagcattctcagaaacttcttggtgatgtttgcattcaaatcccagagttgaaccttcctttgatagttcaggtttgaaacactctttttgtaggatctgcaagtggatatttggaccactctgtggccttcgttcgaaacgggtacatcttcgcataaaatctagacagaagcattctcagaaaatactttgtgatgattgagtttaactcacagagctgaacattcctttggatggagcaggtttgagacacactttttgtagaatctacaagtggatatttggacctctctgaggatttcgttggaaacgggataactgcacctaactaaacggaagcattctcagaaactgctttgtgatgattgcattcacctcacagagttgaacattcctattgatagagcagtttggaaacactcttgttgtggaatgtgcaagtggagatttggagcgctttgaggcctatggtagtaaagggaatagcttcatagaaaaactagacagatgcattctcaggaactttttggtgatgtttgtattcaactcccagagttgaactttcctttggaaagagcagctatgaaacactctttttctagaatctgcaagtggacgtttggagggctttgtggtttgtggtggaaaaggaaatatcttcacctaaatactagatagaagcattctcagaagcttctctgtgatgactgcattcaactcacggagttgaacactccttttgagagcgcagttttgaaactctctttctgtggcatctgcaaggggacatgtagacctctttgaagatttcgttggaaacggaatcatcttcacataaaaactatacagaagcagtctcagaatcttctttgtgatgtttgcattcaaatcccagagttgaactttcctttcaaagttcacgtttgaaacactctttttgcaggatctacaagtggatatttggaccactctgtgtccttcgttcgaaacgggtatatcttcacacgacatctagacagaagctttctcagaaaattctttgggatgattgagtggaactcacagagctgaacattccttgcgatgtagcagtttagaaacacactttctgcagaatctgcaagtgcatatttggacctctctgaggaattcgttggaaacgggataatttcagctgactaaacagaagcattctcagaaccttcttcgtgatgtctgcattcaactcacagtgtggaacctttctttgatagttcaggtttgaaacactctttttgtagaaactgcaaggggatcattgcacttctttgaggcctaccgtagtaaaggaaataacttcctataaaaagaagacagaagcattctcagaaccctcttcgtgatgtttgcattcaactcacagtgctgaacctttctttgatagttcagctttgaaacactcttcttgtagaaactgcaagtggatatttggtcctctctgaggatttcgttggaaacgggataaaccgcacagaactaaacagaagcattctcagaaccttcttcgtgatgtttgcattcaactcacagtgttgaacctttctttgatagttcaggtttgaaacggtctttctgtagaaactgcaagtagatatttggacctctctgaggatttcgttggaaacgggataacccgcacagaactaaaacagaagcattcacagaaaactcttggtgacgactgagtttaactcacagagctgaacattcctttggatggagcagtttcgaaacacactatttgtagaatctgcaagtggatatttgggcctctctgaggatttcgttggaaacgggataaaacgcacagaactaaaacagaagaattctcagaaactactttgtgatgattgcattcaagtcacagagctgaacattccctttgacagagcagtttggaaactctctttgtttagaatctgcaagtggagatatggaatgctttgaggcctatggtagtaaaggaaatagcttcatataaaagctagacagtagcattctcagaaacttctttgtgatgcttgcattcaactcacagagttgaactttcctttcgagagagaagctttgaaacactctttttccagaatctgcaagtggacatttggagggctttgatgtctgtggtggaaaaggaattatcttcccgtaaaagctagatagaagcattgtcagaaacttctttctgatgattgcattcaactcacagagttgaaggttccttttcaaacagcaggttccaaacactctttctgtggaatctgcaagtggatatttggacctctttgaagatttcgttggaaacgggagaatcttcacagaaaagctaaacagaagcattctcagaaacttctctgtgatgtttgtgttcaactcccagagtttcacgttgcttttcatagagtacttctgaaacatgcttttcgtagtgtctgcaagtggacatttggagcgctttcaggcctgtggtggaaaacgaattatggtcacataaaaactggagagaagccttctcagaaacttctctgtgatgattgcattcaactcacagagttgaaccctcctatggatagagcagtgttgaaactctctttttgtggaatctgcaagtggatatgtggacctctccgaagatgtctttggaaacgggaatatcttcacataaaaactaaacagaagcattctcagaaacttcttggtgatgtttgcattcaaatcccagagttgaaccttcctttgatagttcaggtttgaaacactctttttgtaggatctgcaagtggatatttggaccactctgtggccttcgttcgaaacgggtacatcttcgcataaaatctagacagaagcattctcagaaaatactttgtgatgattgagtttaactcacagagctgaacattcctttggatggagcaggtttgagacacactttttgtagaatctacaagtggatatttggacctctctgaggatttcgttggaaacgcgataactgcacctaactaaacggaagcattctcagaaactgctttgtgatgattgcattcacctcacagagttgaacattcctattgatagagcagtttggaaacactcttgttgtggaatgtgcaagtggagatttggagcgctttgaggtctatggtagtaaagggaatagcttcatagaaaaactagacagatgcattctcaggaaccttttggtgatgtttgtattcaactcccagagttgaactttcctttggaaagagcagctatgaaacactctttttctagaatctgcaagtggacgtttggagggctttgtggtttgtggtggaaaaggaaatatcttcacctaaatactagatagaagcattctcagaagcttctctgtgatgactgcattcaactcacggagttgaacactccttttgagagcgcagttttgaaactctctttctgtggcatctgcaaggggacatgtagacctctttgaagatttcgttggaaacggaatcatcttcacataaaaactatacagaagcagtctcagaatcttctttgtgatgtttgcattcaaatccccgagttgaactttcctttcaaagttcacgtttgaaacactctttttgcaggatctacaagtggatatttggaccactctgtgtccttcgttcgaaacgggtatatcttcacatgacatctagacagaagctttctcagaaaattctttgggatgattgagtggaactcacagagctgaacattccttgcgatgtagcagtttagaaacacactttctgcagaatctgcaagtgcatatttggacctctctgaggaattcgttggaaacgggataatttcagctgactaaacagaagcattctcagaaccttcttcgtgatgtctgcattcaactcacagtgtggaacctttctttgatagttcaggtttgaaacactctttttgtagaaactgcaaggggataattgcacttctttgaggcctaccgtagtaaaggaaataacttcctatagaaagaagacagaagcattctcagaaccctcttcgtgatgtttgcattcaactcacagtgctgaacctttctttgatagttcagctttgaaacactcttcttgtagaaactgcaagtggatatttggtcctctctgaggatttcgttggaaacgggataaaccgcacagaactaaacagaagcattctcagaaccttcttcgtgatgtttgcattcaactcacagtgctgaacctttctttgatagttcagctttgaaacactctttttgtagaaactgcaactggatatttggacctctctgaggatttcgttggaaacgggataaaccgcacagaactgaaacagaagcattcacagaaaactcttggtgacgactgagtttaaatcacagagctgaacatccctttggatggagcagtttggaaacacactatttgtagaatgtgcaagtggatattggggcctctctgaggatttcgttggaaacgggataaaccgcacagaactaaacagaagcattctcagaaactactttgttatgattgcattcaagtcacagagttgaacattccctttgacagagcagtttggaaactctctttgtgtagaatctgaaagtggagatatggaccgctttgaggactatggtagtaaaggaaatagcttcatataaaagctagacagtagcattctcagaaacttctttgtgatgcttgcattcaactcacagagttgaactttcctttcgagagagaagctttgaaacactctttttccagaatctgcaagtggacatttggagggctttgaggcctgtggtggaaaaggaattatcttcccgtaaaagctagatagaagcattgtcagaaacatcttcgtgatgatagcattcaactcacagagttgaagtttcctttataaacagcactttccaaacactctttctgtggaatctgcaagtggatatttggacctctttgaagatgtcgttggaaacgggataatgttcacagaaaagctaaacagaagcattctcagaaacttctctgtgatgtttgtgttcaactcccagagtttcacattgcttttcatagagtagttctgaaacatgcttttcgtagtgtctgcaagtggacatttggagcgctttcaggcctgtggtggaaaacgaattatggtcccataaaaactggagagaagccttctcagaaacttctctgtgatgattgcattcaactcacagagttgaaccctcctatggatagagcagtgttgaaactctctttttgtggaatctgcaagtggatatgtggacctctccgaagatgtctttggaaacgggaatatcttcacataaaaactaaacagaagcattctcagaaacttcttggtgatgtttgcattccaatcccagagttgaaccttcctgtgatagttcaggtttgaaacactctttttgtaggatctgcaagtggatatttggaccactctgtggccttcgttcgaaacgggtacatcttcacataaaatctagacagaagcattctcagaaaatactttgtgatgattgagtttaactcacagagctgaacattcctttggatggagcaggtttgagacacactttttgtagaatctacaagtggatatttggacctctctgaggatttcgttagaaacgcgataactgcacctaactaaacggaagcattctcagaaactgctttgtgatgattgcattcacctcacagagttgaacattcctattgatagagcagtttggaaacactcttgttgtggaatgtgcaagtggagatttggagcgctttgaggcctgtggtagtaaagggaatagcttcatagaaaaactagacagatgcattctcaggaactttttggtgatgtttgtattcaactcccagagttgaactttcctttggaaagagcagctatgaaacactctttttctagaatctgcaagtggacgtttggagggctttgtggtttgtggtggaaaaggaaatatcttcacctaaatactagatagaagcattctcagaagcttctctgtgatgactgcattcaactcacggagttgaacactccttttgagagcgcagttttgaaactctctttctgtggcatctgcaaggggacatgtagacctctttgaagatttcgttggaaacggaatcatcttcacataaaaactatacagaagcagtctcagaatcttctttgtgatgtttgcattcaaatcccagagttgaactttcctttcaaagttcacgtttgaaacactctttttgcaggatctacaagtggatatttggaccactctgtgtccttcgttcgaaacgggtataccttcacatgacatctagacagaagctttctcagaaaattctttgggatgattgagtggaactcacagagctgaacattccttgcgatgtagcagtttagaaacacactttctgcagaatctgcaagtgcatatttggacctctctgaggaattcgttggaaacgggataatttcagctgactaaacagaagcattctcagaaccttcttcgtgatgtctgcattcaactcacagtgtggaacctttctttgatagttcaggtttgaaacactctttttgtagaaactgcaaggggataattgcactctttgaggagtaccgtagtaaaggaaataacttcctataaaaagaagacagaagcattctcagaaccctcttcgtgatgtttgcattcaactcacagtgctgaacctttctttgatagttcagctttgaaacactcttcttgtagaaactgcaagtggatatttggtcctctctgaggatttcgttggaaacgggataaaccgcacagaactaaacagaagcattctcagaaccttcttcgtgatgtttgcattcaactcacagtgttgaaactttctttgatagttcaggtttcaaacggtctttctgtagaaactgcaagtagatatttggacctctctgaggatttcgttggaaacgggataactgcacctaactaaacggaagcattcacagaaaactcttggtgacgactgagtttaactcacagagctgaacattcctttggatggagcagtttcgaaacacactatttgtagaatctgcaagtggatatttgggcctctctgaggatttcgttggaaacgggataaaacgcacagaactaaaacagaagaattctcagaaactactttgtgatgattgcattcaagtcacagagctgaacattccctttgacagagcagtttggaaactctctttgtttagaatctgcaagtggagatatggaatgctttgaggcctatggtagtaaaggaaatagcttcatataaaagctagacagtagcattctcagaaacttctttgtgatgcttgcattcaactcacagagttgaactttcctttcgagagagaaggtttgaaacactctttttccagaatctgcaagtggacatttggagggctttgaggcctgtggtggaaaaggaattatcttcccgtaaaagctagatagaagcattgtcagaaacttctttgtgatgattgcattcaactcacagagttgaaggttccttttcaaacagcagtttccaatcactctttctgtggaatctgcaagtggatatttgggcctctctgaggatttcgttggaaacgggataaaacgcacagaactaaaacagaagcattctcagaaacttctctgtgatgtttgtgttcaactcccagagtttcacattgcttttcatagagtagttctgaaacatgcttttcgtagtgtctacaagtggacatttggagcgctttcaggcctgtggtggaaaacgaattatggtcacataaaaactggagagaagccttcacagaaacttctctgtgatgattgcattcaactcacagagttgaaccctcctatggatagagcagtgttgaaactctctttttgtggaatctgcaagtggatatgtggacctctccgaagatgtctttggaaacgggaatatcttcacataaaaactaaacagaagcattctcagaaacttcttggtgatgtttgcattcaaatcccagagttgaaccttcctttgatagttcaggtttgaaacactctttttgtaggatctgcaagtggatatttggaccactctgtggccttcgttcgaaacgggtatatcttcgcataaaatctagacagaagcattctcagaaaatactttgtgatgattgagtttaactcacagagctgaacattcctttggatggagcaggtttgagacacactttttgtagaatctacaagtggatatttggacctctctgaggatttcgttggaaacgggataactgcacctaactaaacggaagcattctcagaaactgctttgtgatgattgcattcacctcacagagttgaccaatcctattgatagagcagtttggaaacactcttgttgtggaatgtgcaagtggagatatggagcgcttcgaggcctatggtagtaaagggaatagcttcatagaaaaactagacagatgcattctcaggaactttttggtgatgtttgtattcaactcccagagttgaactttcctttggaaagagcagctatgaaacactctttttctagaatctgcaagtggacgtttggagggctttgtggtttgtggtggaaaaggaaatatcttcacctaaatactagatagaagcattctcagaagcttctctgtgatgactgcattcagctcacggagttgaacactccttttgagagcgcagttttgaaactctctttctgtggcatctgcaaggggacatgtagacctctttgaagatttcgttggaaacggaatcatcttcacatcaaaactatacagaagcagtctcagaatcttctttgtgatgtttgcattcaaatcccagagttgaactttcctttcaaagttcacgtttgaaacactctttttgcaggatctacaagtggatatttggaccactctgtgtccttcgttcgaaacgggtatatcttcacacgacatctagacagaagctttctcagaaaattctttgggatgattgagtggaactcacagagctgaacattccttgcgatgtagcagtttagaaacacactttctgcagaatctgcaagtgcatatttggacctctctgaggaattcgttggaaacgggataatttcagctgactaaacagaagcattctcagaaccttcttcgtgatgtctgcattcaactcacagtgtggaacctttctttgatagttcaggtttgaaacactctttttgtagaaactgcaaggggatcattgcacttctttgaggcctaccgtagtaaaggagataacttcctataaaaagaagacagaagcattctcagaaccctcttcgtgatgtttgcattcaactcacggtgctgaacctttctttgatagttcagctttgaaacactctttttgtagaaactgcaagtggatatttggtcctctctgaggatttcgttggtaacgggataaaccgcacagaactaaactgaagcattctcagaaccttcttcgtgatgtttgcattcaactcacagtgttgaacctttctttgatagttcaggtttgaaacggtctttctgtagaaactgcaagtagatatttggacctctctgaggatttcgttggaaacgggataacccgcacagaactaaaacagaagcattcacagaaaactcttggtgacgactgagtttaactcacagagctgaacattcctttggatggagcagtttcgaaacacactatttgtagaatctgcaagtggatatttgggcctctctgaggatttcgttggaaacgggataaaacgcacagaactaaaacagaagcattctcagaaactactttgtgatgattgcattcaagtcacagagttgaacattccctttgacagagcagtttggaaactctctttgtgtagaatctgcaagtggagatatggaccgctttgaggcctatggtagtaaaggaaatagcttcatataaaagctagacagtagcattctcagaaacttctttgtgatgcttgcattcaactcagagagttgaactttcctttcgagagagaagctttgaaacactctttttccagaatctgcaagtggacatttggagggctttgaggcctgtggtggaaaaggaattatcttcccgtaaaagctagatagaagcattgtcagaaacttctttgtgatgattgcattcaactcacagagttgaaggttccttttcaaacagcagtttccaatcactctttctgtggaatctgcaagtggatatttcgacctctttgaagatttcgttggaaacaggagaatcttcacagaaaagctaaacagaagcattctcagaaacttctctgtgatgtttgtgttcaactcccagagtttcacgttgcttttcatagagtagatctgaaacatgcttttcgtagtgtctgcaagtggacatttggagcgctttcaggcctgtggtggaaaacgaattatggtcacataaaaactggagagaagccttctcagaaacttctctgtgatgattgcattcaactcacagagttgaaccctcctatggatagagcagtgttgaaactctctttttgtggaatctgcaagtggatatgtggacctctccgaagatgtctttggaaacgggaatatcttcacataaaaactaaacagaagcattctcagaaacttcttggtgatgtttgcattcaaatcccagagttgaaccttcctttgatagttcaggtttgaaacactctttttgtaggatctgcaagtggatatttggaccactctgtggccttcgttcgaaacgggtatatcttcgcataaaatctagacagaagcattctcagaaaatactttgtgatgattgagtttaaatcacagagctgaccattcctttggatggagcaggtttgagacacactttttgtagaatctacaagtggatatttggacctctctgaggatttcgttggaaacgggataactgcacctaactaaacggaagcattctcagaaactgctttgtgatgattgcattcacctcacagagttgaacattcctattgatagagcagtttggaaacactcttgttgtggaatgtgcaagtggagatttggagcgctttgaggtctatggtagtaaagggaatagcttcatagaaaaactagacagatgcattctcaggaaccttttggtgatgtttgtattcaactcccagagttgaactttcctttggaaagagcagctatgaaacactctttttctagaatctgcaagtggacgtttggagggctttgtggtttgtggtggaaaaggaaatatcttcacctaaatactagatagaagcattctcagaagcttctctgtgatgactgcattcaactcacggagttgaacactccttttgagagcgcagttttgaaactctctttctgtggcatctgcaaggggacatgtagacctctttgaagatttcgttggaaacggaatcatcttcacataaaaactatacagaagcagtctcagaatcttctttgtgatgtttgcattcaaatcccagagttgaactttcctttcaaagttcacgtttgaaacactctttttgcaggatctacaagtggatatttggaccactctgtgtccttcgttcgaaacgggtatatcttcacatgacatctagacagaagctttctcagaaaattctttgggatgattgagttgaactcacagagctgagcattccttgcgatgtagcagtttagaaacacactttctgcagaatctgcaagtgcatatttggacctctgtgaggaattcgttggaaacgggataatttcagctgactaaacagaagcattctcagaaccttcttcgtgatgtctgcattcaactcacagtgtggaacctttctttgatagttcaggtttgaaacactctttttgtagaaactgcaaggggataattgcactctttgaggagtaccgtagtaaaggaaataacttcctataaaaagaagacagaagcattctcagaaccctcttcgtgatgtttgcattgaactcacagtgctgaacctttctttgatagttcagctttgaaacactctttttgtagaaactgcaagtgaatatttggtcctctctgaggatttcgttggaaacgggataaaacgcacagaactaaacagaagcattctcagaaccttcttcgtgatgtttgcattcaactcacagtgttgaacctttctttgatagttcaggtttgaaacggtctttctgtagaaactgcaagtagatatttggacctctctgaggatttcgttggaaacgggataaaccgcacagaactaaaacagaagcattcacagaaaactcttggtgacgactgagtttaactcacagagctgaacattcctttggatggagcagtttcgaaacacactatttgtagaatgtgcaactggatatttgggcctctctgaggatttcgtttgaaacgggataaaccgcacagaactaaacagaagcattctcagaaactactttgtgatgattgcattcaagtcacagagttgaacattccctttgacagagcagtttggaaactctctttgtgtagaatctgcaagtggagatatggaccgctttgaggcctatggtagtaaaggaaatagcttcatataaaagctagacagtagcattctcagaaacttctttgtgatgcttgcattcaactcacagagttgaactttcctttcgagagagaagctttgaaacactctttttccagaatctgcaagtggacatttggagggctttgaggcctgtggtggaaaaggaattatcttcccgtaaaagctagatagaagcattgtcagaaacttctttgtgatgattgcattcaactcacagagttgaaggttccttttcaaacagcagtttccaatcactctttctgtggaatctgcaagtggatatttgggcctctctgaggatttcgttggaaacgggataaaacgcacagaactaaaacagaagcattctcagaaacttctctgtgatgtttgtgttcaactcccagagtttcacgttgcttttcatagagtagttctgaaacatgcttttcgtagtgtctgcaagtggacatttggagcgctttcaggcctgtggtggaaaacgaattatggtcacataaaaactggagagaagccttctcagaaacttctctgtgatgattgcattcaactcacagagttgaaccctcctatggatagagcagtgttgaaactctctttttgtggaatctgcaagtggatatgtggacctctccgaagatgtctttggaaacgggaatatcttcacataaaaactaaacagaagcattctcagaaacttcttggtgatgtttgcattcaaatcccagagttgaaccttcctttgatagttcaggtttgaaacactctttttgtaggatctgcaagtggatatttggaccactctgtggccttcgttcgaaacgggtacatcttcccataaaatctagacagaagcattctcagaaaatactttgtgatgattgagtttaaatcacagagctgaccattcctttggatggagcaggtttgagacacactttttgtagaatctacaagtggatatttggacctctctgaggatttcgttggaaacgggataactgcacctaactaaacggaagcattctcagaaactgctttgtgatgattgcattcacctcacagagttgaacattcctattgatagagcagtttggaaacactcttgttgtggaatgtgcaagtggagatttggagcgctttgaggcctatggtagtaaagggaatagcttcatagaaaaactagacagatgcattctcaggaactttttggtgatgtttgtattcaactcccagagttgaactttcctttggaaagagcagctatgaaacactctttttctagaatctgcaagtggacgtttggagggctttgtggtttgtggtggaaaaggaaatatcttcacctaaatactagatagaagcattctcagaagcttctctgtgatgactgcattcaactcacggagttgaacactccttttgagagcgcagttttgaaactctctttctgtggcatctgcaaggggacatgtagacctctttgaagatttcgttggaaacggaatcatcttcacataaaaactatacagaagcagtctcagaatcttctttgtgatgtttgcattcaaatcccagagttgaactttcctttcaaagttcacgtttgaaacactctttttgcaggatctacaagtggatatttggaccactctgtgtccttcgttcgaaacgggtataacttcacacgacatctagacagaagctttctcagaaaattctttgggatgattgagttgaactcacagagctgaacattccttgcgatgtagcagtttagaaacacactttctgcagaatctgcaagtgcatatttggacctctctgaggaattcgttggaaacgggataatttcagctgactaaacagaagcattctcagaaccttcttcgtgatgtctgcattcaactcacagtgtggaacctttctttgatagttcaggtttgaaacactctttttgtagaaactgcaagtgtataattgcacttctttgaggcctaccgtagtaaaggaaataacttcctataaaaagaagacagaagcattctcagaaccctcttcgtgatgtttgcattcaactcacagtgctgaacctttcttcgatagttcagctttgaaacactctttttgtagaaactgcaagtgaatatttggtcctctctgaggatttcgttggaaaagggataaacggcacagaactaaacagaagcattctcagaaccttcttcgtgatgtttgcattcaactcacagtgttgaacctttctttgatagttcaggtttgaaacggtctttctgtagaaactgcaagtagatatttggacctctctgaggatttcgttggaaacgggataaaccgcacagaactaaacagaagcattcacagaaaactcttggtgacgactgagtttaactcacagagctgaacattcctttggatggagcagtttcgaaacacactatttgtagaatgtgcaagtggatatttgggcctctctgaggatttcgttggaaacgggataaaccgcacagaactaaacagaagcattctcagaaactactttgtgatgattgcattcaagtcacagagttgaacattccctttgacagagcagtttggaaactctctttgtgtagaatctgcaagtggagatatggaccgctttgaggcctatggtagtaaaggaaatagcttcatataaaagctagacagtagcattctcagaaacttctttgtgatgcttgcattcaactcacggagttgaactttcctttcgggagagaagctttgaaacactctttttccagaatgtgcaagtggacatttggagggctttgaggcctgtggtggaaaaggaattatcttcccgtaaaagctagatagaagctttgtcagaaacttctttgtgatgattgcattcaagtcacagagttgaaggttccttttcaaagagcagtttccaatcactctttctgtggaatctgcaagtggatatttggacctctttgaagatttcgttggaaacgggagaatcttcacagaaaagctaaacagaagcattctcagaaacttctctgtgatgtttgtgttcaactcccagaatttcacattgcttttcatagagtagttctgaaacatgcttttcgtagtgtctgcaagtggacatttggagcgctttcaggcctgtggtggaaaacgaattatggtcacataaaaactggagagaagccttctcagaaacttctctgtgatgattgcattcaactcacagagttgaaccctcctatggatagagcagtgttgaaactctctttttgtggaatctgcaagtggatatgtggacctctccgaagatgtctttggaaacgggaatatcttcacataaaaactaaacagaagcattctcagaaacttcttggtgatgtttgcattcaaatcccagagttgaaccttcctttgatagttcaggtttgaaacactctttttgtaggatctgcaagtggctatttggaccactctgtggccttcgttcgaaacgggtatatcttcgcataaaatctagacagaagcattctcagaaaatactttgtgatgattgagtttaaatcacagagctgaccattcctttggatggagcaggtttgagacacactttttgtagaatctacaagtggatatttggacctctctgaggatttcgttggaaacgggataactgcacctaactaaacggaagcattctcagaaactgctttgtgatgattgcattcacctcacagagttgaacattcctattgatagagcagtttggaaacactcttgttgtggaatgtgcaagtggagatttggagcgctttgaggcctatggtagtaaagggaatagcttcatagaaaaactagacagatgcattctcaggaactttttggtgatgtttgtattcaactcccagagttgaactttcctttggaaagagcagctatgaaacactctttttctagaatctgcaagtggacgtttggagggctttgtggtttgtggtggaaaaggaaatatcttcacctaaatactagatagaagcattctcagaagcttctctgtgatgactgcattcaactcacggagttgaacactccttttgagagcgcagttttgaaactctctttctgtggcatctgcaaggggacatgtagacctctttgaagatttcgttggaaacggaatcatcttcacataaaaactatacagaagcagtctcagaatcttctttgtgatgtttgcattcaaatcccagagttgaactttcctttcaaagttcacgtttgaaacactctttttgcaggatctacaagtggatatttggaccactctgtgtccttcgttcgaaacgggtatatcttcacacgacatctagacagaagctttctcagaaaattctttgggatgattgagtggaactcacagagctgaacattccttgcgatgtagcagtttagaaacacactttctgcagaatctgcaagtgcatatttggacctctctgaggaattcgttggaaacgggataatttcagctgactaaacagaagcattctcagaaccttcttcgtgatgtctgcattcaactcacagtgtggaacctttctttgatagttcaggtttgaaacactctttttgtagaaactgcaaggggataattgcacttctttgaggcctaccgtagtaaaggaaataacttcctatagaaagaagacagaagcattctcagaaccctcttcgtgatgtttgcattcaactcacagtgctgaacctttctttgatagttcagctttgaaacactctttttgtagaaactgcaagtggatatttggtcctctctgagcatttcgttggaaacgggataaactgcacagaactaaacagaagcattctcagaaccttcttcgtgatgtttgcattcaactcacagtgttgaacctttctttgatagatcaggtttgaaacggtctttctgtagaaactgcaagtagatatttggacctctctgaggatttcgttggaaacgggataaacctcacacaactaaaacagaagaattcacagaaaactcttggtgacgactgagtttaaatcacagagctgaacatccctttggatggagcagtttcgaaacacactatttgtagaatgtgcaagtggatattggggcctctctgaggatttcgttggaaacgggataaaccgcacagaagtaaacagaagcattctcagaaactactttgtgatgattgcattcaagtcacagagttgaacattccctttaacagagcagtttggatactctctttctgtagaatctggaagtggagatatggaccgctttgaggcctatggtagtaaaggaaatagcttcatataaaagctagacagtagcattctcagaaacttctttgtgatgcttgcattcaactcacagagttgaactttcctttcgagagagaagctttgaaacactctttttccagaatctgcaagtggacatttggagggctttgaggcctgtggtggaaaaggaattaacttcccgtaaaagctagatagaagcattgtcagaaacttctttgtgatgattgcattcaactcacagagttgaaggttccttttcaaacagcagtttccaatcactctttctgtggaatctgcaagtggatatttcgacctctttgaagatttcgttggaaacgggagaatcttcacagaaaagctaaacagaagcattctccagaaacttctctgtgatgtttgtgttcaactcccagagtttcacattgcttttcatagagtagttctgaaacatgcttttcgtagtgtctgcaagtggacatttggagcgctttcaggcctgtggtggaaaacgaattatggtcccataaaaactggagagaagccttctcagaaacttctctgtgatgattgcattcaactcacagagttgaaccctcctatggatagagcagtgttgaaactctctttttgtggaatctgcaagtggatatgtggacctctccgaagatgtctttggaaacgggaatatcttcacataaaaactaaacagaagcattctcagaaacttcttggtgatgtttgcattcaaatcccagagttgaaccttcctttgatagttcaggtttgaaacactctttctgtaggatctgcaagtggctatttggaccactctgtggccttcgttcgaaacgggtatatcttcgcataaaatctagacagaagcattctcagaaaatactttgtgatgattgagtttaactcacagagctgaacattcctttggatggagcaggtttgagacacactttttgtagaatctacaagtggatatttggacctctctgaggatttcgttggaaacgcgataactgcacctaactaaacggaagcattctcagaaactgctttgtgatgattgcattcacctcacagagttgaacattcctattgatagagcagtttggaaacactcttgttgtggaatgtgcaagtggagatttggagcgctttgaggcctatggtagtaaagggaatagcttcatagaaaaactagacagatgcattctcaggaactttttggtgatgtttgtattcaactcccagagttgagctttcctttggaaagagcagctatgaaacactctttttctagaatctgcaagtggacgtttggagtgctttgtggattgtggtggaaaaggaaatatcttcacctaaatactagatagaagcattctcagaagcttctctgtgatgactgcattcaactcacggagttgaacactccttttgagagcgcagttttgaaactctctttctgtggcatctgcaaggggacatgtagacctctttgaagatttcgttggaaacggaatcatcttcacataaaatctatacagaagcagtctcagaatcttctttgtgatgtttgcattcaaatcccagagttgaactttcctttcaaagttcacgtttgaaacactctttttgcaggatctacaagtggatatttggaccactctgtgtccttcgttcgaaacgggtatatcttcacacgacatctagacagaagctttctcagaaaattctttgggatgattgagtggaactcacagagctgaacattccttgcgatgtagcagtttagaaacacactttctgcagaatctgcaagtgcatatttggacctctctgaggaattcgttggaaacgggataatttcagctgactaaacagaagcattctcagaaccttcttcgtgatgtctgcattcaactcacagtgtggaacctttctttgatagttcaggtttgaaacactctttttgtagaaactgcaaggggataattgcacttctttgaggcctaccgtagtaaaggaaataacttcctatagaaagaagacagaagaattctcagagccctcttcgtgatgtttgcattcaactcacagtgctgaacctttctttgatagtgcagctttgaaacactctttttgtagaaactgcaagtggatgtttggtcctctctgaggatttcgttggaaacgggataaaccgcacagaactaaaacagaagcattctcagaaccttcttcgtgatgtttgcattcaactcacagtgttgaacctttctttgatagttcaggtttgaaacggtctttctgtagaaactgcaagtagatatttggacctctctgaggatttcgttggaaacgggataacccgcacagaactaaaacagaagcattcacagaaaactcttggtgacgactgagtttaactcacagagctgaacattactttggatggagcagtttcgaaacacactatttgtagaatgtgcaagtggatatttgggcctctctgaggatttcgttggaaacgggataaaccgcacagaactaaacagaagcattctcagaaactactttgtgatgattgcattcaagtcacagagttgaacattccctttgacagagcagtttggaaactctctttgtgtagaatctgcaagtggagatatggaccgctttgaggcctatggtagtaaaggaaatagcttcatataaaagctagacagtagcattctcagaaacttctttgtgatgcttgcattcaactcacagagttgaactttcctttcgagagagaagctttgaaacactctttttccagaatctgcaagtggacatttggagggctttgaggcctgtggtggaaaaggaattatcttcccgtaaaagctagatagaaagcattgtcagaaacttctttgtgatgattgcattcaagtcacagagttgaaggttccttttcaaagagcagtttccaatcactctttctgtggaatctgcaagtggatatttggacctctttgaagatttcgttggaaacgggagaatcttcacagaaaagctaaacagaagcattctcagaaacttctctgtgatgtttgtgttcaactcccagagtttcacgttgcttttcatagagtagttctgaaacatgcttttcgtagtgtctgcaagtggacatttggagcgctttcaggcctgtggtggaaaacgaattatggtcacataaaaactggagagaagccttctcagaaacttctctgtgatgattgcattcaactcacagagttgaaccctcctatggatagagcagtgttgaaactctctttttgtggaatctgcaagtggatatgtggacctctccgaagatgtctttggaaacgggaatatcttcacataaaaactaaacagaagcattctcagaaacttcttggtgatgtttgcattcaaatcccagagttgaaccttcctttgatagttcaggtttgaaacactctttttgtaggatctgcaagtggctatttggaccactctgtggccttcgttcgaaacgggtatatcttcgcataaaatctagacagaagcattctcagaaaatactttgtgatgattgagtttaaatcacagagctgaccattcctttggatggagcaggtttgagacacactttttgtagaatctacaagtggatatttggacctctctgaggatttcgttggaaacgggataactgcacctaactaaacggaagcattctcagaaactgctttgtgatgattgcattcacctcacagagttgaacattcctattgatagagcagtttggaaacactcttgttgcggaatgtgcaagtggagatttggagcgctttgaggcctgtggtagtaaagggaatagcttcatagaaaaactagacagatgcattctcaggaactttttggtgatgtttgtattcaactcccagagttgaactttcctttggaaagagcagctatgaaacactctttttctagaatctgcaagtggacgtttggagggctttgtggtttgtggtggaaaaggaaatatcttcacctaaatactagagagaagcattctcagaagcttctctgtgatgactgcattcaactcacggagttgaacactccttttgagagcgcagttttgaaactctctttctgtggcatctgcaaggggacatgtagacctctttgaagatttcgttggaaacggaatcatcttcacataaaaactatacagaagcagtctcagaatcttctttgtgatgtttgcattcaaatcccagagttgaactttcctttcaaagttcacgtttgaaacactctttttgcaggatctacaagtggatatttggaccactctgtgtccttcgttcgaaacgggtatatcttcacacgacatctagacagaagctttctcagaaaattctttgggatgattgagtggaactcacagagctgaacattccttgcgatgtagcagtttagaaacacactttctgcagaatctgcaagtgcatatttggacctctctgaggaattcgttggaaacgggataatttcagctgactaaacagaagcattctcagaaccttcttcgtgatgtctgcattcaactcacagtgtggaacctttctttgatagttcaggtttgaaacactctttttgtagaaactgcaaggggataattgcacttctttgaggcctaccgtagtaaaggaaataacttcctatagaaagaagacagaagcattctcagaaccctcttcgtgatgtttgcattcaactcatagtgctgaacctttctttgatagttcagctttgaaacactctttttgtagaaactgcaagtggatatttggtcctctctgagcatttcgttggaaacgggataaactgcacagaactaaacagaagcattctcagaaccttcttcgtgatgtttgcattcaactcacagtgttgaacctttctttgatagttcaggtttgaaacggtctttctgtagaaactgcaagtagatatttggacctctctgaggatttcgttggaaacgggataacccgcacagaactaaaacagaagcattcacagaaaactcttggtgacgactgagtttaactcacagagctgaacattcctttggatggagcagtttcgaaacacactatttgtagaatctgcaagtggatatttgggcctctctgaggatttcgttggaaacgggataaaacgcacagaactaaaacagaagcattctcagaaactactttgtgatgattgcattcaagtcacagagttgaacattccctttgacagagcagtttggaaactctctttgtgtagaatctgcaagtggagatatggaccgctttgaggactatggtagtaaaggaaatagcttcatataaaagctagacagtagcattctcagaaacttctttgtgatgcttgcattcaactcacagagttgaactttcctttcgagagagaagctttgaaacactctttttccagaatctgcaagtggacatttggagggctttgaggcctgtggtggaaaaggaattatcttcccgtaaaagctagatagaagcattgtcagaaacttctttgtgatgattgcatacaagtcacagagttgaaggttccttttcaaagagcagtttccaatcactctttctgtggaatctgcaagtggatatttggacctctttgaagatttcgttggaaacgggagaatcttcacagaaaagctaaacagaagcattctcagaaacttctctgtgatgtttttgttcaactcccagagtttcacattgcttctcatagagtagttctgaaacatgcttttcgtagtgtctgcaagtggacatttggagcgctttcaggtctgtggtggaaaacgaattatggtcacataaaaactggagagaagccttctcagaaacttctctgtgatgattgcattcaactcacagagttgaaccctcctatggatagagcagtgttgaaactctctttttgtggaatctgcaagcggatatgtggacctctccgaagatgtctttggcaacgggaatatcttcacataaaaactaaacagaagcattctcagaaacttcttggtgatgtttgcattcaaatcccagagttgaaccttcctttgagagttcaggtttgaaacactctttttgtaggatctgcaagtggatatttggaccactctgtggccttcgttcgaaacgggtacatcttcgcataaaatctagacagaagcattctcagaaaatactttgtgatgattgagtttaactcacagagctgaacattcctttggatggagcaggtttgagacacaccttttgtagaatctacaagtggatatttggacctctctgaggatttcgttggaaacgggataactgcacctaactaaacggaagcattctcagaaactgcattgtgatgattgcattcacctcacagagttgaacattcctattgatagagcagtttggaaacactcttcttgtggaatgtgcaagtggagatttggagcgctttgaggcctatggtagtaaagggaatagcttcatagaaaaactagacagatgcattctcaggaactttttggtgatgtttgtattcaactcccagagttgaactttcctttggaaagagcagctatgaaacactctttttctagaatctgcaagtggacgtttggagggctttgtggtttgtggtggaaaaggaaatatcttcacctaaatactagatagaagcattctcagaagcttctctgtgatgactgcattcaactcacggagttgaacactccttttgagagcgcagttttgaaactctctttctgtggcatctgcaaggggacatgtagacctctttgaagatttcgttggaaacggaatcatcttcacataaaaactatacagaagcagtctcagaatcttctttgtgatgtttgcattcaaatcccagagttgaactttcctttcaaagttcacgtttgaaacactctttttgcaggatctacaagtggatatttggaccactctgtgtccttcgttcgaaacgggtatatcttcacacgacatctagacagaagctttctcagaaaattgtttgggatgattgatttgaactcacagaggtgagcattccttgcgatgtagcagtttagaaacacactttctgcagaatctgcaagtgcatatttggacctctctgaggaattcgttggaaacgggataatttcagctgactaaacagaagcattctcagaaccttcttcgtgatgtctgcattcaactcacagtgtggaacctttctttgatagttcaggtttgaaacactctttttgtagaaactgcaaggggataattgcacttctttgaggcctaccgtagtaaaggaaataacttcctatagaaagaagacagaagcattctcagaaccctcttcgtgatgtttgcattcaactcacagtgctgaacctttctttgatagttcagctttgaaacactcttcttgtagaaactgcaagtggatatttggtcctctctgaggatttcgttggaaacgggataaaccgcacagaactaaacagaagcattctctgaaccctcttcgtgatgtttgcattcaactcacagtgttgaacctttctttgatagttcaggtttgaaacggtctttctgtagaaactgcaagtagatatttggacctctctgaggatttcgttggaaacgggataaaccgcacagaactaaaacagaagcattcacagaaaactcttggtgacgactgagtttaactcacagagctgaacatccctttggatggagcagtttcgaaacacactatttgtagaatgtgcaagtggatattagggcctctctgaggatttcgttggaaacgggataaaccgcacagaactaaacagaagcattctcagaaactactttgtgatgattgcattcaagtcacagagttgaacattccctttgacagagcagtttggaaactctctttgtgtagaatctgcaagtggagatatggaccgctttgaggcctatggtagtaaaggaaatagcttcatataaaagctagacagtagcattctcagaaacttctttgtgatgcttgcattcaactcacagagttgaactttcctttcgagagagaagctttgaaacactctttttccagaatctgcaagtggacatttggagggctttgaggcctgtggtggaaaaggaattatcttcccgtaaaagctagatagaagcattgtcagaaacttctttgtgatgattgcattcaactcacagagttgaaggttccttttcaaacagcagtttccaatcactctttctgtggaatctgcaagtggatatttcgacctctttgaagatttcgttggaaacgggagaatcttcacagaaaagctaaacagaagcattctcagaaacttctctgtgatgtttgtgttcaactcccagagtttcacgttgcttttcatagagtagttctgaaacatgcttttcgtagtgtctgcaagtggacatttggagcgctttcaggcctgtggtggaaaacgaattatggtcacataaaaactggagagaagccttctcagaaacttctctgtgatgattgcattcaactcacagagttgaaccctcctatggatagagcagtgttgaaactctctttttgtggaatctgcaagtggatatgtggacctctccgaagatgtctttggaaacgggaatatcttcacataaaaactaaacagaagcattctcagaaacttcttggtgatgtttgcattcaaatcccagagttgaaccttcctttgatagttcaggtttgaaacactctttctgtaggatctgcaagtggctatttggaccactctgtggccttcgttcgaaacgggtatatcttcgcataaaatctagacagaagcattctcagaaaatactttgtgatgattgagttgaactcacagagctgaacattcctttggatggagcaggtttgagacacactttttgtagaatctacaagtggatatttggacctctctgaggatttcgttggaaacgggataactgcacctaactaaacggaagcattctcagaaactgctttgtgatgattgcattcacctcacagagttgaacattcctattgatagagcagtttggaaacactcttgttgtggaatgtgcaagtggagatttggagcgctttgaggcctgtggtagtaaagggaatagcttcatagaaaaactagacagatgcattctcaggaactttttggtgatgtttgtattcaactcccagagttgaactttcctttggaaagagcagctatgaaacactctttttctagaatctgcaagtggacgtttggagggctttgtggtttgtggtggaaaaggaaatatcttcacctaaatactagatagaagcatcctcagaagcttctctgtgatgactgcattcaactcacggagttgaacactccttttgagagcgcagttttgaaactctctttctgtggcatctgcaaggggacatgtagacctactttgaagatttcgttggaaacggaatcatcttcacataaaaactacacagaagcagtctcagaatcttctttgtgatgtttgcattcaaatcccagagttgaactttcctttcaaagttcacgtttgaaacactctttttgcaggatctacaagtggatatttggaccactctgtgtccttcgttcgaaacgggtatatcttcacacgacatctagacagaagctttctcagaaaattctttgggatgattgagtggaactcacagagctgaacattccttgcgatgtagcagtttagaaacacactttctgcagaatctgcaagtgcatatttggacctctctgaggaattcgttggaaacgggataatttcagctgactaaacagaagcattctcagaaccttcttcgtgatgtctgcattcaactcacagtgtggaacctttctttgatagttcaggtttgaaacactctttttgtagaaactgcaaggggataattgcacttctttgaggcctaccgtagtaaaggaaataacttcctatagaaagaagacagaagcattctcagaaccctcttcgtgatgtttgcattcaactcacagtgctgaacctttctttgatagttcagctttgaaacactcttcttgtagaaactgcaagtggatatttggtcctctctgaggatttcgttggaaacgggataaaccgcacagaactaaacagaagcattctctgaaccttcttcgtgatgtttgcattcaactcacagtgttgaacctttctttgatagttcaggttggaaacggtctttctgtagaaactgcaagtagatatttggacctctctgaggatttcgttggaaacgggataaaccgcacagaaccaaaacagaagcattcacagaaaactcttggtgacgactgagtttaactcacagagctgaacattcctttggatggagcagtttcgaaacacactatttgtagaatgtgcaagtggatatttgggcctctctgaggatttcgctggaaacgggataaaccgcacagaactaaacagaagcattctcagaaactactttgtgatgattgcattcaagtcacagagttgaacattccctttgacagagcagtttggaaactctctttgtgtagaatctgcaagtggagatatggaccgctttgaggcctatggtagtaaaggaaatagcttcatataaaagctagacagtagcattctcagaaacttctttgtgatgcttgcattcaactcacagagttgaactttcctttcgagagagaagctttgaaacactctttttccagaatctgcaagtggacatttggagggctttgaggcctgtggtggaaaaggaattatcttcccgtaaaagctagatagaagcattgtcagagacttctttgtgatgattgcattcaagtcacagagttgaaggttccttttcaaagagcagtttccaatcactctttctgtggaatctgcaagtggatatttggacctcctttgaagatttcgttggaaacgggagaatcttcacagaaaagctaaacagaagcattctcagaaacttctctgtgatgtttgtgttcaactcccagagtttcacgttgcttttcatagagtagttctgaaacatgcttttcgtagtgtctgcaagtggacatttggagcgctttcaggcctgtggtggaaaacgaattatggtcacataaaaactggagagaagccttctcagaaacttctctgtgatgattgcattcaactcacagagttgaaccctcctatggatagagcagtgttgaaactctctttttgtggaatctgcaagtggatatgtggacctctccgaagatgtctttggaaacgggaatatcttcacataaaaactaaacagaagcattctcagaaacttcttggtgatgtttgcattcaaatcccagagttgaaccttcctttgatagttcaggtttgaaacactctttctgtaggatctgcaagtggctatttggaccactctgtggccttcgttcgaaacgggtatatcttcgcataaaatctagacagaagcattctcagaaaatactttgtgatgattgagtttaaatcacagagctgaccattcctttggatggagcaggtttgagacacactttttgtagaatctacaagtggatatttggacctctctgaggatttcgttggaaacgggataactgcacctaactaaacggaagcattctcagaaactgctttgtgatgattgcattcacctcacagagttgaacattcctattgatagagcagtttggaaacactcttgttgtggaatgtgcaagtggagatttggagcgctttgaggcctatggtagtaaagggaatagcttcatagaaaaactagacagatgcattttcaggaaccttttggtgatgtttgtattcaactcccagagttgaactttcctttggaaagagcagctatgaaacactctttttctagaatctgcaagtggacgtttggagggctttgtggtttgtggtggaaaaggaaatatcttcacctaaatactagatagaagcattctcagaagcttctctgtgatgactgcattcaactcacggagttgaacactccttttgagagcgcagttttgaaactctctttctgtggcatctgcaaggggacatgtagacctctttgaagatttcgttggaaacggaatcatcttcacatcaaaactatacagaagcagtctcagaatcttctttgtgatgtttgcattcaaattcctgagttgaactttcctttccaagttcacgtttgaaacactctttttgcaggatctacaagtggatatttggaccactctgtgtccttcgttcgaaacgggtatatcttcacatgacatctagacagaagctttctcagaaaattctttgggatgattgagttgagcaaacagagctgaacactccttgtgatgtagcagtttagaaacacactttctgcagaatctgcaagtgcatatgtggacctctctgaggaattcgttggaaacgggataatttcagctgactaaacagaaagcattctcagaaccttcttcgtgatgtctgcgttcaactcacagtgtggaacctttctttgatagttcaggtttgaaacactctttttgtagaaactgcaaggggatcattgcacttctttgaggcctaccgtagtaaaggagataacttgctataaaaagaagacagagaattctcagagccctcttcgtgatgtttgcattcaactcacagtgctgaacctttctttgatagtgcagctttgaaacactctttttgtagaaactgcaagtggatgtttggtcctctctgaggatttcgttggaaacgggataaaccgcacagaactaaaacagaagcattctcagaaccttcttcgtgatgtttgcattcaactcacagtgttgaacctttctttgatagttcaggtttgaaacggtctttctgtagaaactgcaagtagatatttggacctctctgaggatttcgttggaaacgggataacccgcacagaactaaaacagaagcattcacagaaaactcttggtgacgactgagtttaactcacagagctgaacattcctttggatggagcagtttcgaaacacactatttgtagaatgtgcaagtggatatttgggcctctctgaggatttcgttggaaacgggataaaccgcacagaactaaacagaagcattctcagaaactactttgtgacgattgcattcaagtcacagagttgaacattccctttgacagagcagtttggaaactctctttgtgtagaatctgcaagtggagatatggaccgctttgaggcctatggtagtaaaggaaatagcttcatataaaagctagacagtagcattctcagaaacttctttgtgatgcttgcattcaactcacagagttgaactttcctttcgagagagaagctttgaaacactctttttccagaatctgcaagtggacatttggagggctttgaggcctgtggtggaaaaggaattaacttcccgtaaaagctagatagaagcattgtcagaaacttctttgtgatgattgcattcaactcacagagatgaaggttcctttacaaacagcagtttccaaacactctttctgtggaatctgcaagtggatatttggacctctttgaagatttcgttggaaacgggagaatcttcacagaaaagctaaacagaagcattctcagaaacttctctgtgatgtttgtgttcaactcccagagtttcacgttgcttttcatagagtagttctgaaacatgcttttcgtagtgtctgcaagtggacatttggagcgctttcaggcctgtggtggaaaacgaattatggtcacataaaaactggagagaagccttctcagaaacttctctgtgatgattgcattcaactcacagagttgaaccctcctatggatagagcagtgttgaaactctctttttgtggaatctgcaagtggatatgtggacctctccgaagatgtctttggaaacgggaatatcttcacataaaaactaaacagaagcattctcagaaacttcttggtgatgtttgcattcaaatcccagagttgaaccttcctttgatagttcaggtttgaaacactctttttgtaggatctgcaagtggatatttggaccactctgtggccttggttcgaaacgggtacatcttcgcataaaatctagacagaagcattctcagaaaatactttgtgatgattgagtttaactcacagagctgaacattcctttggatggagcaggcttgagacacactttttgtagaatccacaagtggatatttggacctctctgaggatttcgttggaaacgggataactgcacctaactaaacggaagcattctcagaaactgctttgtgatgattgcattcacctcacagagttgaacattcctattgatagagcagtttggaaacactcttgttgtggaatgtgcaagtggagatttggagcgctttgaggcctatggtagtaaagggaatagcttcatagaaaaactagacagatgcattctcaggaactttttggtgatgtttgtattcaactcccagagttgaactttcctttggaaagagcagctatgaaacactctttttctagaatctgcaagtggacgtttggagggctttgtggtttgtggtggaaaaggaaatatcttcacctaaatactagacagaagcatcctcagaagcttctctgtgatgactgcattcaactcacggagttgaacactccttttgagagcgcagttttgaaactctctttctgtggcatctgcaaggggacatgtagacctctttgaagatttcgttggaaacggaatcatcttcacataaaaactatacagaagcagtctcagaatcttctttgtgatgtttgcattcaaatcccagagttgaactttcctttcaaagttcacgtttgaaacactctttttgcaggatctacaagtggatatttggaccactctgtgtccttcgttcgaaacgggtatatcttcacacgacatctagacagaagctttctcagaaaattctttgggatgattgagtggaactcacagagctgaacattccttgcgatgtagcagtttagaaacacactttctgcagaatctgcaagtgcatatttggacctctctgaggaattcgttggaaacgggataatttcagctgactaaacagaagcattctcagaaccttcttcgtgatgtctgcattcaactcacagtgtggaacctttctttgatagttcaggtttgaaacactctttttgtagaaactgcaaggggataattgcacttctttgaggcctaccgtagtaaaggaaataacttcctatagaaagaagacagaagcattctcagaaccctcttcgtgatgtttgcattcaactcacagtgctgaacctttgtttgatagttcagctttgaaacactctttttgtagaaactgcaagtgaatatttggtcctctctgaggatttcgttggaaacgggataaaacgcacagaactaaacagaagcattctcagaaccttcttcgtgatgtttgcattcaactcacagtgttgaacctttctttgatagttcaggtttgaaacggtctttctgtagaaactgcaagtagatatttggacctctctgaggatttcgttggaaacgggataaaccgcacagaactaaaacagaagcattcacagaaaactcttggtgtcgactgagtttaactcacagagctgaacattcctttggatggagcagtttcgaaacacactatttgtagaatgtgcaagtggatatgtgggcctctctgaggatttcgttggaaacgggataaaccgcacagaactaaacagaagcattctcagaaactactttgtgatgattgcattcaagtcacagagttgaacattccctttgacagagcagtttggaaactctctttgcgtagaatctgcaagtggagatatggaccgctttgaggcctatggtagtaaaggaaatagcttcatataaaagctagacagcagcattctcagaaacttctttgtgatgcttgcattcaactcacagagttgaactttcctttcgagagagaagctttgaaacactctttttccagaatctgcaagtggacatttggagggctttgaggcctgtggtggaaaaggaattatcttcccgtaaaagctagatagaagcattgtcagaaacttctttgtgatgattgcattcaactcacagagttgaaggttccttttcaaacagcagtttccaatcactctttctgtggaatctgcaagtggatatttgggcctctctgaggatttcgttggaaacgggataaaacgcacagaactaaaacagaagcattctcagaaacttctctgtgatgtttgtgttcaactcccagagtttcacgttgcttttcatagagtagttctgaaacatgcttttcgtagtgtctgcaagtggacatttggagcgctttcaggcctgtggtggaaaacgaattatggtcacataaaaactggagagaagccttctcagaaacttctctgtgatgattgcattcaactcacagagttgaaccctcctatggatagagcagtgttgaaactctctttttgtggaatctgcaagtggatatgtggacctctccgaagatgtctttggaaacgggaatatcttcacataaaaactaaacagaagcattctcagaaacttcttggtgatgtttgcattcaaatcccagagttgaaccttcctttgatagttcaggtttgaaacactctttctgtaggatctgcaagtggctatttggaccactctgtggccttcgttcgaaacgggtatatcttcgcataaaatctagacagaagcattctcagaaaatactttgtgatgattgagtttaaatcacagagctgaacattcctttggatggagcaggtttgagacacactttttgtagaatctacaagtggatatttggacctcctctgaggatttcgttggaaacgggataactgcacctaactaaacggaagcattctcagaaactgctttgtgatgattgcattcacctcacagagttgaacattcctattgatagagcagtttggaaacactcttgttgtggaatgtgcaagtggagatttggagcgctttgaggcctatggtagtaaagggaatagcttcatagaaaaactagacagatgcattctcaggaactttttggtgatgtttgtattcaactcccagagttgaactttcctttggaaagagcagctatgaaacactgtttttctagaatctgcaagtggacgtttggagggctttgtggtttgtggtggaaaaggaaatatcttcacctaaatactagatagaagcattctcagaagcttctctgtgatgactgcattcaactcacggagttgaacactccttttgagagcgtagttttgaaactctctttctgtggcatctgcaaggggacatgtagacctctttgaagatttcgttggaaacggaatcatcttcacataaaaactatacagaagcagtctcagaatcttctttgtgatgtttgcattcaaatcccagagttgaactttcctttcaaagttcacgtttgaaacactctttttgcaggatctacaagtggatatttggaccactctgtgtcctccgttcgaaacgggtatatcttcacatgacatctagacagaagctttctcagaaaattctttgggatgattgagtggaactcacagagctgaacattccttgcgatgtagcagtttagaaacacactttctgcagaatctgcaagtgcatatttggacctctctgaggaattcgttggaaacgggataatttcagctgactaaacagaagcattctcagaaccttcttcgtgatgtctgcattcaactcacagtgtggaacctttctttgatagttcaggtttgaaacactctttttgtagaaactgcaaggtgataattgcacttctttgaggcctaccgtagtaaaggaaataacttcctatagaaagaagacagaagcattctcagaaccctcttcgtgatgtttgcattcaactcacagtgctgaacctttctttgatagttcagctttgaaacactcttcttgtagaaactgcaagtggatatttggtcctctctgaggatttcgttggaaacgggataaactgcacagaactaaacagaagcattctcagaaccttcttcgtgatgtttgcattcaactcacagtgttgaacctttctttgatagttcaggtttgaaacggtctttctgtagaaactgcaagtagatatttggacctctctgaggatttcgttggaaacgggataaaccgcacagaactaaaacagaagcattcacagaaaactcttggtgacgtctgagtttgactcacagagctgaacattcctttggatggagcagtttcgaaacacactctttgtagaatctgcaagtggatatttaggcctctctgaggatttcgttggaaatgggataaaccgcacagaactaaaacagaagcattctcagaaactactttgtgatgattgcattcaagtcacagagttgaacattccctttgacagagcagtttggaaactctctttgtgtagaatctgcaagtggagatatggaccgctttgaggcctatggtagtaaaggaaatagcttcatataaaagctagacagtagcattctcagaaacttctttgtgatgcttgcattcaactcacagagttgaactttcctttcgagagagaagctttgaaacactctttttccagaatctgcaagtggacatttggagggctttgaggcctgtggtggaaaaggaattatcttcccgtaaaagctagatagaagcattgtcagaaacttctttgtgatgattgcattcaactcacagagttgaaggttccttttcaaacagcagtttccaatcactctttctgtggaatctgcaagtggatatttgggcctctctgaggatttcgttggaaacgggataaaacgcacagaactaaaacagaagcattctcagaaacttctctgtgatgtttgtgttcaactcccagagtttcacgttgcttttcatagagtagttctgaaacatgcttttcgtagtgtctgcaagtggacatttggagcgctttcaggcctgtggtggaaaacgaattatggtcacataaaaactggagagaagccttctcagaaacttctctgtgatgattgcattcaactcacagagttgaaccctcctatggatagagcagtgttgaaactctctttttgtggaatctgcaagtggatatgtggacctctccgaagatgtctttggaaacgggaatatcttcacataaaaactaaacagaagcattctcagaaacttcttggtgatgtttgcattcaaatcccagagttgaactttcctgtgatagttcaggtttgaaacactctttttgtaggatctgcaagtggatatttggaccactctgtggccttcgttcgaaacgggtacatcttcacataaaatctagacagaagcattctcagaaaatactttgtgatgattgagtttaactcacagagctgaacattcctttggatggagcaggtttgagacacactttttgtagaatctacaagtggatatttggacctctctgaggatgtcgttggaaacgcgataactgcacctaactaaacggaagcattctcagaaactgctttgtgatgattgcattcacctcacagagttgaacattcctattgatagagcagtttggaaacactcttgttgtggaatgtgcaagtggagatttggagcgctttgaggtctatggtagtaaagggaatagcttcatagaaaaactagacagatgcattctcaggaactttttggtgatgtttgtattcaactcccagagttgaactttcctttggaaagagcagctatgaaacactctttttctagaatctgcaagtggacgtttggagggctttgtggtttgtggtggaaaaggaaatatcttcacctaaatactagatagaagcattctcagaagcttctctgtgatgactgcattcaactcacggagttgaacactccttttgagagcgcagttttgaaactctctttctgtggcatctgcaaggggacatgtagacctctttgaagatttcgttggaaacggaatcatcttcacataaaaactatacagaaagcagtctcagaatcttctttgtgatgtttgcattcaaatcccagagttgaactttcctttcaaagttcacgtttgaaacactctttttgcaggatctacaagtggatatttggaccactctgtgtccttcgttcgaaacgggtatatcttcacatgacatctagacagaagctttctcagaaaattctttgggatgattgagtggaactcacagatctgaacattccttgcgatgtagcagtttagaaacacactttctgcagaatctgcaagtgcatatgtggacctctctgaggaattcgttggaaacgggataatttcagctgactaaacagaagcattctcagaaccttcttcgtgatgtctgcattcaactcacagtgtggaacctttctttgatagttcaggtttgaaacactctttttgtagaaactgcaaggggataattactcttctttgaggcctaccgtagtaaaggaaataacttcctatagaaagaagacagaagaattctcagagccctcttcgtgatgtttgcattcaactcacagtgctgaacctttctttgatagtgcagctttgaaacactctttttgtagaaactgcaagtggatgtttggtcctctctgaggatttcgttggaaacgggataaaccgcacagaactaaaacagaagcattctcagaaccttcttcgtgatgtttgcattcaactcacagtgttgaacctttctttgatagttcaggttggaaacggtctttctgtagaaactgcaagtagatatttggacctctctgaggatttcgttggaaacgggataaaccgcacagaactaaaacagaagcattcacagaaaactcttggtgacgactgagtttaactcacagagctgaacattcctttggatggagcagtttcgaaacacactatttgtagaatctgcaagtggatatttgggcctctctgaggatttcgttggaaacgggataaaccgcacagaactaaaacagaagcattctcagaaactactttgtgatgattgcattcaagtcacagagttgaacattccctttgacagaacagtttggaaactctctttgtgtagaatctgcaagtggagatatggaccgctttgaggcctatggtagtaaaggaaatagcttcatataaaagctagacagtagcattctcagaaacttctttgtgatgcttgcattcaactcacagagttgaactttcctttcgagagagaagctttgaaacactctttttccagaatctgcaagtggacatttggagggctttgaggcctgtggtggaaaaggaattatcttcccgtaaaagctagatagaagcattgtcagaaacttctttgtgatgattgcattcaactcacggagatgaaggttcctttacaaacagcagtttccaaacactctttctgtggaatctgcaagtggatatttggacctctttgaagatttcgttggaaacgggagaatcttcacagaaaagctaaacagaagcattctcagaaacttctctgtgatgtttgtgttcaactcccagagtttcacgttgcttttcatagagtagttctgaaacatgcttttcgtagtgtctgcaagtggacatttggagcgctttcaggcctgtggtggaaaacgaattatggtcacataaaaactggagagaagccttctcagaaacttctctgtgatgattgcattcaactcacagagttgaaccctcctatggatagagcagtgttgaaactctctttttgtggaatctgcaagtggatatgtggacctctccgaagatgtctttggaaacgggaatatcttcacataaaaactaaacagaagcattctcagaaacttcttggtgatgtttgcattcaaatcccagagttgaaccttcctttgatagttcaggtttgaaacactctttctgtaggatctgcaagtggctatttggaccactctgtggccttcgttcgaaacgggtatatcttcgcataaaatctagacagaagcattctcagaaaatactttgtgatgattgagttgaactcacagagctgaacattcctttggatggagcaggtttgagacacactttttgtagaatctacaagtggatatttggacctctctgaggatttcgttggaaacgggataactgcacctaactaaacggaagcattctcagaaactgctttgtgatgattgcattcacctcacagagttgaacattcctattgatagagcagtttggaaacactcttgttgtggaatgtgcaagtggagatttggagcgctttgaggcctatggtagtaaagggaatagcttcatagaaaaactagacagatgcattctcaggaactttttggtgatgtttgtattcaactcccagagttgaactttcctttggaaagagcagctatgaaacactctttttctagaatctgcaagtggacgtttggagggctttgtggtttgtggtggaaaaggaaatatcttcacctaaatactagatagaagcattctcagaagcttctctgtgatgactgcattcaactcacggagttgaacactccttttgagagcgcagttttgaaactctctttctgtggcatctgcaaggggacatgtagacctctttgaagatttcgttggaaacggaatcatcttcacataaaaactatacagaagcagtctcagaatcttctttgtgatgtttgcattcaaatccccgagttgaactttcctttcaaagttcacgtttgaaacactctttttgcaggatctacaagtggatatttggaccactctgtgtccttcgttcgaaacgggtatatcttcacatgacatctagacagaagctttctcagaaaattctttgggatgattgagtggaactcacagagctgaacattccttgcgatgtagcagtttagaaacacactttctgcagaatctgcaagtgcatatttggacctctctgaggaattcgttggaaacgggataatttcagctgactaaacagaagcattctcagaaccttcttcgtgatgtctgcattcaactcacagtgtggaacctttctttgatagttcaggtttgaaacactctttttgtagaaactgcaaggggataattgcacttctttgaggcctaccgtagtaaaggaaataacttcctatagaaagaagacagaagcattctcagaaccctcttcgtgatgtttgcattcaactcacggtgctgaacctttctttgatagttcagctttgaaacactctttttgtagaaactgcaagtggatatttggtcctctctgaggatttcgttggaaacgggataaaccgcacagaactaaacagaagcattctcagaaccttcttcgtgatgtttgcattcaactcacagtgttgaacctttctttgatagttcaggtttgaaacggtctttctgtagaaactgcaagtagatatttggacctctctgaggatttcgttggaaacgggataaaccgcacagaactaaaacagaagcattcacagaaaactcttggtgacgactgagtttaactcacagagctgaacattcctttggatggagcagtttcgaaacacactatttgtagaatgcgcaagtggatatttgggactctctgaggatttcgttggaaacgggataaaccgcacagaactaaacagaaccattctgagaaactactttgtgatgattgcattcaagtcacagagctgaacattccctttgacagagcagtttggaaactctctttgtgtagaatctgcaagtggagatatggaatgctttgaggactatggtagtaaaggaaatagcttcatataaaagctagacagtagcattctcagaaacttctttgtgatgcttgcattcaactcacagagttgaactttcctttcgagagagaagctttgaaacactctttttccagaatgtgcaagtggacatttggggagctttgaggcctgtggtggaaaaggaattatcttcccgtaaaagctagatagaagcattgtcagaaacttctttgtgatgattgcattcaactcacagagttgaaggttccttttcaaacagcagtttccaatcactctttctgtggaatctgcaagtggatatttgggcctctctgaggatttcgttggaaacgggataaaacgcacagaactaaaacagaagcattctcagaaacttctctgtgatgtttgtgttcaactcccagagtttcacattgcttttcatagagtagttctgaaacatgcttttcgtagtgtctacaagtggacatttggagcgctttcaggcctgtggtggaaaacgaattatggtcacataaaaactggagagaagccttctcagaaacttctctgtgatgattgcattcaactcacagagttgaaccctcctatggatagagcagtgttgaaactctctttttgtggaatctgcaagtggatatgtggacctctccgaagatgtctttggaaacgggaatatcttcacataaaaactaaacagaagcattctcagaaacttcttggtgatgtttgcattcaaatcccagagttgaaccttcctttgatagttcaggtttgaaacactctttctgtaggatctgcaagtggctatttggaccactctgtggccttcgttcgaaacgggtatatcttcgcataaaatctagacagaagcattctcagaaaatactttgtgatgattgagtttaaatcacagagctgaccattcctttggatggagcaggtttgagacacactttttgtagaatctacaagtggatatttggacctctctgaggatttcgttggaaacgggataactgcacctaactaaacggaagcattctcagaaactgctttgtgatgattgcattcacctcacagagttgaacattcctattgatagagcagtttggaaacactcttgttgtggaatgtgcaagtggagatttggagcgctttgaggcctatggtagtaaagggaatagcttcatagaaaaactagacagatgcattctcaggaactttttggtgatgtttgtattcaactcccagagttgaactttcctttggaaagagcagctatgaaacactctttttctagaatctgcaagtggacgtttggagggctttgtggtttgtggtggaaaaggaaatatcttcacctaaatactagatagaagcattctcagaagcttctctgtgatgactgcattcaactcacggagttgaacactccttttgagagcgcagttttgaaactctctttctgtggcatctgcaaggggacatgtagacctctttgaagatttcgttggaaacggaatcatcttcacataaaaactatacagaagcagtctcagaatcttctttgtgatgtttgcattcaaatcccagagttgaactttcctttcaaagttcacgtttgaaacactctttttgcaggatctacaagtggatatttggaccactctgtgtccttcgttcgaaacgggtatatcttcacaggacatctagacagaagctttctcagaaaattctttgggatgattgagtggaactcacagagctgtacattccttgcgatgtagcagtttagaaacacactttctgcagaatctgcaagtgcatatttggacctctctgaggaattcgttggaaacgggataatttcagctgactaaacagaagcattctcagaaccttcttcgtgatgtctgcattcaactcacagtgtggaacctttctttgatagttcaggtttgaaacactctttttgtagaaactgcaaggggataattgcacttctttgaggcctaccgtagtaaaggaaataacttcctatagaaagaagacagaagcattctcagaaccctcttcgtgatgtttgcattcaactcacagtgctgaacctttctttgatagttcagctttgaaacactcttcttgtagaaactgcaagtggatatttggtcctctctgaggatttcgttggaaacgggataaaccgcacagaactaaacagaagcattctcagaaccttcttcgtgatgtttgcattcaactcacagtgttgaacctttctttgatagttcaggtttgaaacggtctttctgtagaaactgcaagtagatatttggacctctctgaggatttcgttggaaacgggataacccgcacagaactaaaacagaagcattcacagaaaactcttggtgacgactgagtttaactcacagaactgaacattcctttggatggagcagtttcgaaacacagtatttgtagaatgtgcaagtggatatgtgggcctctgtgaggatttcgttggaaacgggataaaccgcacagaactaaacagaagcattctcagaaactactttgtgatgattgcattcaagtcacagagctgaacattccctttgacagagcagtttggaaactctctttgtgtagaatctgcaagtggagacatggaccgctttgaggcctatggtagtaaaggaaatagcttcatataaaacctagacagtagcatcctcagaaacttctttgtgatgcttgcattcaactcacagagttgaactttcctttcgagagagaagctttgaaacactctttttccagaatctgcaagtggacatttggagggctttgaggcctgtggtggaaaaggaattatcttcccgtaaaagctagatagaagcattgtcagaaacttctttgtgatgattgcattcaactcacagagttgaaggttccttttcaaacagcagtttccaatcactctttctgtggaatctgcaagtggatatttcgacctctttgaagatttcgttggaaacgggagaatcttcacagaaaagctaaacagaagcattctcagaaacttctctgtgatgtttgtattcaactcccagagtttcacgttgcttttcatagagtagttctgaaacatgcttttcgtagtgtctgcaagtggacatttggagcgctttcaggcctgtggtggaaaacgaattatggtcacataaaaactggagagaagccttctcagaaacgtctctgtgatgattgcattcaactcacagagttgaaccctcctatggatagagcagtgttgaaactctctttttgtggaatctgcaagtggatatgtggacctctccgaagaagtctttggaaacgggaatatcttcacataaaaactaaacggaagcattctcagaaacttcttggtgatgtttgcattcaaatcccagaggtgaaacttcctttgagagttcaggtttgaaacactctttttgtaggatctgcaagtggatatttggaccactctgtggccttcgttcgaaacgggtacatcttcgaataaaatctagacagaagcattctcagaaaatactttgtgatgattgagtttaaatcacagagctgaccattcctttggatggagcaggtttgagacacactttttgtagaatctacaagtggatatttggacctctctgaggatttcgttggaaacgggataactgcacctaactaaacggaagcattctcagaaactgctttgtgatgattgcatttcacctcacagagttgaacattcctattgatagagcagtttggaaacactcttgttgtggaatgtgcaagtggagatttggagcgctttgaggcctatggtagtaaagggaatagcttcatagaaaaactagacagatgcattctcaggaactttttggtgatgtttgtattcaactcccagagttgaactttcctttggaaagagcagctatgaaacactctttttctagcatctgcaagtggacgtttggagggctttgtggtttgtagtggaaaaggaaatatcttcacctaaatactagatagaagcattctcagaagcttctctgtgatgactgcattcaactcacggagttgaacactccttttgagagcgcagttttggaactccctttctgtggcatctgcaaggggacatgtagacctctttgaagatttcgttggaaacggaatcatcttcacatcaaaactatacagaagcagtctcagaatcttctttgtgatgtttgcattcaaatcccagagttgaactttcctttcaaagttcacgtttgaaacactctttttgcaggatctacaagtggatatttggaccactctgtgtccttcgttcgaaacgggtatatcttcacatgacatctagacagaagctttctcagaaaattgtttgggatgattgacttgaactcacagcagctgagcattccttgcgatgtagcagtttagaaacacactttctgcagaatctgcaagtgcatatttggacctctctgaggaattcgttggaaacgggataatttcagctgactaaacagaagcattctcagaaccttcttcgtgatgtctgcattcaactcacagtgtggaacctttctttgatagttcaggtttgaaacactctttttgtagaaactgcaaggggataattgcacttctttgaggcctaccgtagtaaaggaaataacttcctatagaaagaagacagaagcattctcagaaccttcttcgtgatgtttgcattcaactcacagtgctgaacctttctttgatagttcagctttgaaacactctttttgtagaaactgcaagtggatatttggtcctctctgaggatttcgttggaaacgggataaaccgcacagaactaaacagaagcattcacagaaaactcttggtgacgactgagtttaactcacagagctgaacattcctttggatggagcagtttcgaaacacactctttgtagaatgtgcaagtggatatttgggcctctctgaggatttcgttggaaacgggataaaccgcacagaactaaaacagaagcattctgagaaactactttgtgatgattttattcaagtcacagagctgaacattccctttgacagagcagtttggaaactctctttgtgtagaatctgcaagtggagatatggaatgctttgaggactatggtagtaaaggaaatagcttcatataaaagctagacagtagcattctcagaaacttctttgtgatgcttgcattcaactcacagagttgaactttcctttcgagagagaagctttgaaacactctttttccagaatctgcaagtggacatttggagggctttgaggcctgtggtggaaaaggaattatcttcccgtaaaagctagatagaagcattgtcagaaacttctttgtgatgattgcattcaactcacagagttgaaggttccttttcaaacagcagtttccaatcactctttctgtggaatctgcaagtggatatttgggcctctctgaggatttcgttggaaacgggataaaacgcacagaactaaaacagaagcattctcagaaacttctctgtgatgtttgtgttcaactcccagagtgtcacattgcttctcatagagtagttctgaaacatgcttttcgtagtgtctgcaaggggacatttggagcgctttcaggcctgtggtggaaaacgaattatggtcacataaaaactggagagaagccttctcagaaacttctctgtgatgattgcattcaactcacagagttgaaccgtcctatggatagagcagtgttgaaactctctttttgtggaatctgcaagtggatatgtggacctctccgaagatgtctttggaaacggggctatcttcacataaaaactaaacagaagcattctcagaaacttcttcgtgatgtttgcattcaaatcccagagttgaaccttcctttgagagttcaggtttgaaacactctttttgtaggatctgcaagtggatatttggaccactctgtggccttcgttcgaaacgggtacatcttcgcataaaatctagacagaagcattctcagaaaatactttgtgatgattgagttgaactcacagagctgaacattcctttggatggagcaggtttgagacacactttttgtagaatctacaagtggatatttggacctctctgaggatttcgttggaaacgggataactgcacctaactaaacggaagcattctcagaaactgctttgtgatgattgcattcacctcacagagttgaacattcctattgatagagcagtttggaaacactcttgttgtggaatgtgcaagtggagatttggagcgctttgaggtctatggtagtaaagggaatagcttcatagaaaaactagacagatgcattctcaggaactttttggtgatgtttgtattcaactcccagagttgaactttcctttggaaagagcagctatgaaacactctttttctagaatctgcaagtggacgtttggagggctttgtggtttgtggtggaaaaggaaatatcttcacctaaatactagatagaagctttctcagaagcttctctgtgatgactgcattcaactcacggagttgaacactccttttgagagcgcagttttgaaactccctttctgtggcatctgcaaggggacatgtagacctctttgaagatttcgttggaaacggaatcatcttcacataaaaactatacagaagtagtctcagaatcttctttgtgatgtttgcattcaaatcccagagttgaactttcctttcaaagttcacgtttgaaacactctttttgcaggatctacaagtggatatttggaccactctgtgtccttcgttcgaaacgggtatatcttcacacgacatctagacagaagctttctcagaaaattctttgggatgattgagttgaactcacagagctgaacattccttgcgatgtagcagtttagaaacacactttctgcagaatctgcaagtgcatatttggacctctctgaggaattcgttggaaacgggataatttcagctgactaaacagaagcattctcagaaccttcttcgtgatgtctgcattcaactcacagtgtggaacctttctttgatagttcaggtttgaatcactctttttgtagaaactgcaaggggataattgcacttctttgaggcctaccgtagtaaaggaaataacttcctataaaaagaagacagaagaattctcagagccctcttcgtgatgtttgcattcaactcacagtgctgaacctttctttgatagtgcagctttgaaacactctttttgtagaaactgcaagtggatgtttggtcctctctgaggatttcgttggaaacgggataaaccgcacagaactaaaacagaagcattctcagaaccttcttcgtgatgtttgcattcaactcacagtgttgaacctttctttgatagttcaggtttgaaacggtctttctgtagaaactgcaagtagatatttggacctctctgaggatttcgttggaaacgggataaactgcacagaactaaaacagaagcattcacagaaaactcttggtgacgactgagtttaactcacagagctgaacattcctttggatggagcagtttcgaaacacactatttgtagaatgtgcaagtggatatttaggcctctctgaggatttcgttggaaatgggataaaccgcacagaactaaacagaagcattctcagaaactactttgtgatgattgcattcaagtcacagagttgaacattccccttgacagagcagtttggaaactctctttgtgtagaatctgcaagtggagatatggaccgctttgaggcctatggtagtaaaggaaatagcttcatataaaagctagacagtagcattctcagaaacttctttgtgatgcttgcattcaactcacagagttgaactttcctttcgagagagaaggtttgaaacactctttttccagaatctgcaagtggacatttggagggctttgaggcctgtggtggaaaaggaattatcttcccgtaaaagctagatggaagcattgtcagaaacttctttgtgatgattgcattcaaatcacagagttgaaggttccttttcaaacagcagtttccaatcactctttctgtggaatgtgcaagtggatatttggacctctttgaagatttcattggaaacgggagaatcttcacagaaaagctaaacagaaagcattctcagaaacttctctgtgatgtttgtgttcaactcccagagtttcacattgcttttcatagagtagttctgaaacatgcttttcgtagtgtctgcaagtggacatttggagcgctttcaggcctgtggtggaaaacgaattatggtcacataaaaactggagagaagccttctcagaaacttctctgtgatgattgcattcaactcacagagttgaaccctcctatggatagagcagtgttgaaactctctttttgtggaatctgcaagtggatatgtggacctctccgaagatgtctttggaaacgggaatatcttcacataaaaactaaacagaagcattctcagaaacttcttggtgatgtttgcattcaaatcccagagttgaaccttcctttgatagttcaggtttgaaacacactttttgtaggatctgcaagtggatatttggaccactctgtggccttcgttcaaaacgggtacatcttcgcataaaatctagacagaagcattctcagaaaatactttgtgatgattgagtttaaatcacagagctgaccattcctttggatggagcaggtttgagacacactttttgtagaatctacaagtggatatttggaccctctctgaggatttcgttggaaacgggataactgcacctaactaaacggaagcattctcagaaactgctttgtgatgattgcattcacctcacagagttgaacattcctattgatagagcagtttggaaacactcttgttgtggaatgtgcaagtggagatttggagcgctttgaggcctatggtagtaaagggaatagcttcatagaaaaactagacagatgcattctcaggaaccttttggtgatgtttgtattcaactcccagagttgaactttcctttggaaagagcagctatgaaacactctttttctagaatctgcaagtggacgtttggagggctttgtggtttgtggtggaaaaggaaatatcttcacctaaatactagatagaagcattctcagaagcttctctgtgatgactgcattcaactcacggagttgaacactccttttgagagcgcagttttgaaactctctttctgtggcatctgcaaggggacatgtagacctctttgaagatttcgttggaaacggaatcatcctcacatcaaaactatacagaagcagtctcagaatcttctttgtgatgtttgcattcaaatcccagagttgaactttcctttcaaagttcacgtttgaaacactctttttgcaggatctacaagtggatatttggaccactctgtgtccttcgttcgaaacgggtatatcttcacacgacatctagacagaagctttctcagaaaattctttgggatgattgagtggaactcacagagctgaacattccttgcgatgtagcagtttagaaacacactttctgcagaatctgcaagtgcatatttggacctctctgaggaattcgttggaaacgggataatttcagctgactaaacagaagcattctcagaaccttcttcgtgatgtctgcattcaactcacagtgtggaacctttctttgatagttcaggtttgaaacactctttttgtagaaactgcaaggggataattgcacttctttcaggtctaccgtagtaaaggaaataacttcctataaaaagaagacagaagcattctcagaaccttcttcgtgatgtttgcattcaactcacagtgctgaacctttctttgatagttcagctttgaaacactctttttgtagaaactgcaagtggatatttggtcctctctgaggatttcgttggaaacgggataaaccgcacagaactaaacagaagcattcacagaaaactcttggtgacgactgagtttaactcacagagctgaacattcctttggatggagcagtttcgaaacacactctttgtagaatgtgcaagtggatatttgggcctctctgaggatttcgttggaaacgggataaaccgcacagaactaaaacagaagcattctcagaaactactttgtgatgattgcattcaagtcacagagttgaacattccctttgacagagcagtttggaaactctctttgtgtagaatctgcaagtggagatatggaccgctttgaggcctatggtagtaaaggaaatagcttcatataaaagctagacagtagcattctcagaaacttctttgtgatgcttgcattcaactcacagagttgaactttcctttcgagagagaagctttgaaacactctttttccagaatctgcaagtggacatttggagggctttgaggcctgtggtggaaaaggaattaacttcccgtaaaagctagatagaagcattgtcagaaacttctttgtgaggattgcattcaactcacagagttgaatgttccttttcaaacagcagtttccaaacactctttctgtggaatctgcaagtggatatttggacctctttgaagatttcgttggaaacgggagaatcttcacagaaaagctaaacggaagcattctcagaaacttctctgtgatgtttgtgttcaactcccagagtttcacgttgcttttcatagagtagttctgaaacatgcttttcgtagtgtctgcaagtggacatttggagcgctttcaggcctgtggtggaaaacgaattatggtcacataaaaatggagagaagccttctcagaaacttctctgtgatgattgcattcaactcacagagttgaaccctccctatggatagagcagtgttgaaactctctttttgtggaatctgcaagtggatatgtggacctctccgaagatgtctttggaaacgggaatatcttcacataaaaactaaacagaagcattctcagaaacttcttggtgatgtttgcattcaaatcccagagttgaaccttcctttgatagttcaggtttgaaacactctttctgtaggatctgcaagtggctatttggaccactctgtggccttcgttcgaaacgggtatatcttcgcataaaatctagacagaagcattctcagaaaatactttgtgatgattgagtttaaatcacagagctgaacattcctttggatggagcaggtttgagacacactttttgtagaatctacaagtggatatttggacctctctgaggatttcgttggaaacgggataactgcacctaactaaacggaagcattctcagaaactgctttgtgatgattgcattcacctcacagagttgaacattcctattgatagagcagtttggaaacactcttgttgtggaatgtgcaagtggagatttggagcgctttgaggcctgtggtagtaaagggaatagcttcatagaaaaactagacagatgcattctcaggaactttttggtgatgtttgtattcaactcccagagttgaactttcctttggaaagagcagctatgaaacactctttttctagaatctgcaagtggacgtttggagggctttgtggtttgtggtggaaaaggaaatatcttcacctaaatactagatagaagcattctcagaagcttctctgtgatgactgcattcaactcacggagttgaacactccttttgagagcgcagttttgaaactctctttctgtggcatctacaaggggacatgaagacctctttgaagatttcgttggaaacggaatcatcttcacataaaaactatacagaagcagtctcagaatcttctttgtgatgtttgcattcaaatcccagagttgaactttcctttcaaagttcacgtttgaaacactctttttgcaggatctacaagtggatatttggaccactctgtgtccttcgttcgaaacgggtatatcttcacatgacatctagacagaagctttctcagaaaattctttgggatgattgagttgaactcacagagctgaacattccttgcgatgtagcagtttagaaacacactttctgcagaatctgcaagtgcatatttggacctctgtgaggaattcgttggaaacgggataatttcagctgactaaacagaagcattctcagaaccttcttcgtgatgtctgcattcaactcacagtgtggaacctttctttgatagttcaggtttgaaacactctttttgtagaaactgcaaggggataattgcacttctttgaggcctaccgtagtaaaggaaataacttcctatagaaagaagacagaagcattctcagaaccctcttcgtgatgtttgcattcaactcacagtgctgaacctttctttgatagttcagctttgaaacactctttttgtagaaactgcaagtggatatttggtcctctctgaggaattcgttggaaacgggataaactgcacagaactaaacagaagcattctcagaaccttcttcgtgatgtttgcattcaactcacagtgctgaacctttctttgatagttcagctttgaaacactctttttgtagaaactgcaagtggatatttggtgctctctgaggatttcgttggaaacgggataaaccgcacagaactaaacagaagcattcacagaaaactcttggtgacgactgagtttaactcacagagctgaacattcctttggatggagcagtttcgaaacacactctttgaagaatctgcaagtggatatttgggcctctctgaggatttcgttggaaacgggataaaccgcacagaactaaaacagaagcattctcagaaactactttgtgatgattgcattcaagtcacagagttgaacattccctttgacagagcagtttggaaactctctttgtgtagaatctgcaagtggagatatggaccgctttgaggcctatggtagtaaaggaaatagcttcatataaaagctagacagtagcattctcagaaacttctttgtgatgcttgcattcaactcacagagttgaactttcctttcgagagagaagctttgaaacactctttttccagaatgtgcaagtggacatttggggagctttgaggcctggggtggaaaaggaattatcttcccgtaaaagctagatagaagcattgtcagaaacttctttgtgatgattgcattcaactcacagagttgaaggttccttttcaaagagcagtttccaatcactctttgtgtggaatctgcaagtggatatttggacctattttgaagatttcgttggaaacgggagaatcttcacaggaaagctaaacagaagcattctcagaaacttctctgtgatgtttgtgttcaactcccagagtttcacgttgcttttcatagagtagttctgaaacatgcttttcgtagtgtctgcaagtggacatttggagcgctttcaggcctgtggtggaaaacgaattatggtcacataaaaactggagagaagccttctcagaaacttctctgtgatgactgcattcaactcacagagttgaaccctcctatggatagagcagtgttgaaactctctttttgtggaatctgcaagtggatatgtggacctctccgaagatgttctttggaaacgggaatatcttcacataaaaactaaacagaagcattctcagaaacttcttggtgatgtttgcattcaaatcccagagttgaaccttcctttgatagttcaggtttgaaacactctttctgtaggatctgcaagtggctatttggaccactctgtggccttcgttcgaaacgggtatatcttcgcataaaatctagacagaagcattctcagaaaatactttgtgatgattgagtttaaatcacagagctgaccattcctttggatggagcaggtttgagacacactttttgtagaatctacaagtggatatttggacctctctgaggatttcgttggaaacgggataactgcacctaactaaacggaagcattctcagaaactgctttgtgatgattgcattcacctcacagagttgaacattcctattgatagagcagtttggaaacactcttgttgtggaatgtgcaagtggagatttggagcgctttgaggcctgtggtagtaaagggaatagcttcatagaaaaactagacagatgcattctcaggaactttttggtgatgtttgtattcaactcccagagttgaactttcctttggaaagagcagctatgaaacactctttttctagaatctgcaagtggacgtttggagggctttgtggtttgtggtggaaaaggaaatatcttcacctaaatactagatagaagcattctcagaagcttctctgtgatgactgcattcaactcacggagttgaacactccttttgagagcgcagttttgaaactctctttctgtggcatctgcaaggggacatgtagacctctttgaagatttcgttggaaacggaatcatcttcacataaaaactatacagaagcagtctcagaatcttctttgtgatgtttgcattcaaatcccagagttgaactttcctttcaaagttcacgtttgaaacactctttttgcaggatctacaagtggatatttggaccactctgtgtccttcgttcgaaacgggtatatctttcacacgacatctagacagaagctttctcagaaaattctttgggatgattgagtggaactcacagagctgaacattccttgcgatgtagcagtttagaaacacactttctgcagaatctgcaagtgcatatttggacctctctgaggaattcgttggaaacgggataatttcagctgactaaacagaagcattctcagaaccttcttcgtgatgtctgcattcaactcacagtgtggaacctttctttgatagttcaggtttgaaacactctttttgtagaaactgcaaggggataattgcactctttgaggagtaccgtagtaaaggaaataacttcctataaaaagaagacagaagaattctcagagccctcttcgtgatgtttgcattcaactcacagtgctgaacctttctttgatagtgcagctttgaaacactctttttgtagaaactgcaagtggatgtttggtcctctctgaggatttcgttggaaacgggataaaccgcacagaactaaaacagaagcattctcagaaccttcttcgtgatgtttgcattcaactcacagtgttgaacctttctttgatagttcaggtttgaaacggtctttctgtagaaactgcaagtagatatttggacctctctgaggatttcgttggaaacgggataaaccgcacagaactaaacagaagcattcacagaaaactcttggtgacgactgagtttaactcacagagctgaacattcctttggatggagcagtttcgaaacacactatttgtagaatctgcaagtggatacttgggcctctctgaggatttcgttggaaacgggataaaacgcacagaactaaaacagaagcattctcagaaactactttgtgatgattgcattcaagtcacagagttgaacattccctttgacagagcagtttggaaactctctttgtgtagaatctgcaagtggagatatggaccgctttgaggcctatggtagtaaaggaaatagcttcatataaaagctagacagtagcattctcagaaacttctttgtgatgcttgcattcaactcacagagttgaactttcctttcgagagagaagctttgaaacactctttttccagaatctgcaagtggacatttggagggctttgaggcctgtggtggaaaaggaattatcatcccgtaaaagctagatagaagcattgtcagaaacttctttgtgatgattgcattcaactcagagagttgaaggttccttttcaaacagcagtttccaatcactctttctgtggaatctgcaagtggatatttggacctattttgaagatttcgttggaaacgggataatcttcacagaaaagccaaacagaagcattctcagaaacttctctgtgatgtttgtgttcaactcccagagtttcacattgcttttcatagagtagttctgaaacatgcttttcgtagtgtctgcaagtggacatttggagcgctttcaggcctgtggtggaaaacgaattatggtcacataaaaactggagagaagccttctcagaaacttctctgtgatgattgcattcaactcacagagttgaaccctcctatggatagagcagtgttgaaactctctttttgtggaatctgcaagtggatatgtggacctctccgaagatgtctttggaaacgggaatatcttcacataaaaactaaacagaagcattctcagaaacttcttggtgatgtttgcattcaaatcccagagttgaaccttcctttgatagttcaggtttgaaacactctttttgtaggatctgcaagtggatatttggaccacactgtggccttcgttcaaaacgggtacatcttcgcataatatgtagacagaagcattctcagaaaatactttgtgatgattgagtttaactcacagagctgaacattcctttggatggagcaggtttgagacacaccttttgtagaatctacaagtggatatttggacctctctgaggatttcgttggaaacgggataactgcacctaactaaacggaagcattctcagaaactgctttgtgatgattgcattcacctcacagagttgaacattcctattgatagagcagtttggaaacactcttgttgtggaatgtgcaagtggagatttggagcgctttgaggcctatggtagtaaagggaatagcttcatagaaaaactagacagatgcattctcaggaactttttggtgatgtttgtattcaactcccagagttgaactttcctttggaaagagcagctatgagacactgtttctctagaatctgcaagtggacgtttggagggctttgtggtttgtggtggaaaaggaaatatcttcacctaaatactagatagaagcattctcagaagcttctctgtgatgactgcattcaactcacagagttgaacactccttttgagagtgcagttttgaaactctctttctgtggcatctgcaaggggacatgtagacctctctgaagatttcgttggaaacggaatcatcttcacataaaaactatacagaagcagtctcagaatcttctttgcgatgtttgcattcaaatcccagagttgaactttcctttcaaagttcacatttgaaacactctttttgcaggatctacaagtggatatttggaccactctgtgtacttcgttcgaaacgggtatatcttcacatgacatctagacagaagctttctcagaaaattctttgggatgattgagtggaactcacagagctgaacattccttgcgatgtagcagtttagaaacacactttctgcagaatctgcaagtgcatatttggacctctctgaggaattcgttggaaacgggataatttcagctgactaaacagaagcattctcagaaccttcttcgtggtgtctgcattcaactcacagtgtggaacctttctttgatagttcaggcttgaaacactctttttgtagagactgcaaggggataattgcacttctttgaggcctaccgtagtaaaggaaataacttcctataaaaagaagacagaagcattctcagaaccctcttcgtgatgtttgcattcaactcacagtgctgaacgtttctttgatagttcagctttgaaacactctttttgtagaaactgcaagtggatatttggtcctctctgaggatttcgttggaaacgggataaaccgcacagaactaaacagaagcattctcagaaccttcttcgtgatgtttgcattcaactcacagtgttgaacctttctttgatagttcagctttgaaacggtctttctgtagaaactgcaagtagatatttggccctctctgaggatttcgttggaaacgggataaaccgcacagaactaaaacagaagcattcacagaaaactcttggtgacgactgagtttaactcacagagctgaacattcctttggatggagcagtttcgaaacacactatttgtagaatgtgcaagtggatatttgggcctctctgaggatttcgttggaaacgggataaaccgcacagaactaaacagaagcattctcagaaactactttgtgatgattgcattcaagtcacagagttgaacattccctttgacagagcagtttggaaactctctttgtgtagaaaatgcaagtggagatatggaccgctttgaggcctatggtagtaaaggaaatagcttcatataaaagctagacagtagcattctcagaaacttctttgtgatgcttgcattcaactcacagatttgaactttcctttcgagagagaagctttgaaacactctttttccagaatctgcaagtggacatttggagggctttgaggcctgtggtggaaaaggaattatcttccgtaaaagctagatagaagcattgtcagaaacttctttgtgatgattgcattcaactcacagagttgaaggttccttttcaaacagcagtttccaatcactctttctgtggaatctgcaagtggatgtttggacctctttgaagatttcgttggaaacgggagaatcttcacagaaaagctaaacagaagcattctcagaaacttctctctgatgtttgtgttcaactcccagagtttcacattgcttttcatagagtagttctgaaacatgcttttcgtagggtctgcaaggggacatttggagcgctttcaggcctgtggtggaaaacgaattatggtcacataaaaactggagagaagccttctcagaaacttctctgtgatgattgcattcaactcacagagttgaaccctcctatggatagagcagtgttgaaactctctttttgtggaatctgcaagtggatatgtggacctctccgaagatgtctttggaaacgggaatatcttcacataaaaactaaacagaagcattctcagaaacttcttggtgatgtttgcattcaaatcccagagtcgaaccttcctttgatagttcaggtttgaaacactctttttgtaggatctgcaagtggatatttggaccactctgtggccttcgttcgaaacgggtatatcttcgcataaaatctagacagaagcattctcagaaaatactttgtgatgattgagttgaactcacagagctgaacattcctttggatggagcaggtttgagacacactttttgtagaatctacaagtggatatttggacctctctgaggatttcgttggaaacgggataactgcacctaactaaacggaagcattctcagaaactgctttgtgatgattgcattcacctcacagagttgaacattcctattgatagagcagtttggaaacactcttgttgtggaatgtgcaagtggagatttggagcgctttgaggcctatggtagtaaagggaatagcttcatagaaaaactagacagatgcattctcaggaactttttggtgatgtttgtattcaactcccagagttgaactttcctttggaaagagcagctatgaaacactctttttctagaatctgcaagtggacgtttggagggctttgtggtttgtggtggaaaaggaaatatcttcacctaaatactagagagaagcattctcagaagcttctctgtgatgactgcattcaactcacggagttgaacactccttttgagagcgcagttttgaaactccctttctgtggcatctgcaaggggacatgtagacctctttgaagatttcgttggaaacggaatcatcttcacataaaaactatacagaagcagtctcagaatcttctttgtggtgtttgcattcaaatcccagagttgaactttcctttcaaagttcacgtttgaaacactctttttgcaggatctacaagtggatatttggaccactctgtgtccttcgttcgaaacgggtatatcttcacatgacatctagacagaagctttctcagaaaattctttgggatgattgagtggaactcacagagctgaacattccttgcgatgtagcagtttagaaacacagtttctgcagaatctgcaagtgcatatttggacctctctgaggaattcgttggaaacgggataatttcagctgactaaacagaagcattctcagaaccttcttcgtgatgtctgcattcaactcacagtgtggaacctttctttgatagttcaggtttgaaacactctttttgtagaaactgcaaggggataattgcacttctttgaggcctacccgtagtaaaggaaataacttcctatagaaagaagacagaagcattctcagaaccctcttcgtgatgtttgcattcaactcacagtgctgaacctttctttgatagttcagctttgaaacactcttcttgtagaaactgcaagtggatatttggtcctctctgaggatttcgttggaaacgggataaaccgcacagaactaaacagaagcattctcagaaccttcttcgtgatgtttgcattcaactcacagtgttgaacctttctttgatagttcaggtttgaaacggtctttctgtagaaactgcaagtagatatttggacctctctgaggatttcgttggaaacgggataacccgcacagaactaaaacagaagcattcacagaaaactcttggtgacgactgagtttaactcacagagctgaacattcctttggatggagcagtttcgaaacacactatttgtagaatgtgcaagtggatatttaggcctctctgaggatttcgttggaaacgggataaaccgcacagaactaaacagaagcattctcagaaactactttgtgatgattgcattcaagtcacagagttgaacattccctttgacagagcagtttggaaactctctttgtgtagaatctgcaagtggagatatggaccgctttgaggcctatggtagtaaaggaaatagcttcatataaaagctagacagtaacattctcagaaacttctttgtgatgcttgcattcaactcacagagttgaactttcctttcgagagagaagctttgaaacactctttttccagaatctgcaagtggacatttggagggctttgaggcctgtggtggaaaaggaattaacttcccgtaaaagctagatagaagcattgtcagaaacttctttgtgatgattgcattcaactcacagagttgaaggttccttttcaaagagcagtttccaatcactctttctgtggaatctgcaagtggatatttcgacctattttgaagatttcgttggaaacgggataatcttcacagaaaagctaaacagaagcattctcagaaacttctctgtgatgtttgtgttcaactcccagagtttcacattgcttttcatagagtagttctgaaacatgcttttcgtagtgtctacaagtggacatttggagcgcttccagtcctgtggtggaaaacgaattatggtcacataaaaactggagagaagccttctcagaaacttctctgtgatgattgcattcaactcacagagttgaaccctccctatggatagagcagtgttgaaactctctttttgtggaatctgcaagtggatatgtggacctctccgaagatgtctttggaaacgggaatatcttcacataaaaactaaacagaagcattctcagaaacttcttggtgatgtttgcattcaaatcccagagttgaaccttcctttgatagttcaggtttgaaacactctttttgtaggatctgcaagtggctatttggaccactctgtggccttcgttcgaaacgggtatatcttcgcataaaatctagacagaagcattctcagaaaatactttgtgatgattgagttgaactcacagagctgaacattcctttggatggagcaggtttgagacacactttttgtagaatctacaagtggatatttggacctctctgaggatttcgttggaaacgggataactgcacttaactaaacggaagcattctcagaaactgctttgtgatgattgcattcacctcacagagttgaacattcctattgatagagcagtttggaaacactcttcttgtggaatgtgcaagtggagatttggagcgctttgaggcctatggtagtaaagggaatagcttcatagaaaaactagacagatgcattctcaggaactttttcgtgatgtttgtattcaactcccagagttgaactttcctttggaaagagcagctatgaaacactctttttctagaatctgcaagtggacgtttggagggctttgtggtttgtggtggaaaaggaaatatcttcacctaaatagtagatagaagcattctcagaagcttctctgtgatgactgcattcaactcacggagttgaacactccttttgagagcgcagttttgaaactctctttctgtggcatctgcaaggggacatgtagacctctttgaagatttcgttggaaacggaatcatcttcacatcaaaactatacagaagcagtcttagaatcttctttgtgatgtttgcattcaaatcccagagttgagctttctttcaaagttcacgtttgaaacactctttttgcaggatctacaagtggatatttggaccactctgtgtccttcgttcgaaacgggtatatcttcacatgacatctagacagaagctttctcagaaaattctttgggatgattgagtggaactcacagaagctgaacattccttgcgatgtagcagtttagaaacacactttctgcagaatctgcaagtgcatatgtggacctctctgaggaattcgttggaaacgggataatttcagctgactaaacagaagcattctcagaaccttcttcgtgatgtctgcattcaactcacagtgtggaacctttctttgatagttcaggtttgaaacactctttttgtagaaactgcaaggggataattgcacttctttgaggcctaccgtagtaaaggaaataacttcctatagaaagaagacagaagaattctcagagccctcttcgtgatgtttgcattcaactcacagtgctgaacctttctttgatagtgcagctttgaaacactctttttgtagaaactgcaagtggatgtttggtcctctctgaggatttcgttggaaacgggataaaccgcacagaactaaaacagaagcattctcagaaccttcttcgtgatgtttgcattcaactcacagtgttgaacctttctttgatagttcaggtttgaaacggtctttctgtagaaactgcaagtagatatttggacctctctgaggatttcgttggaaacgggataacccgcacagaactaaaacagaagcattcacagaaaactcttggtgacgactgagtttaactcacagagctgaacattcctttggatggagcagtttcgaaacacactatttgtagaatgtgcaagtggatatttaggcctctctgaggatttcgttggaaacgggataaaccgcacagaactaaacagaagcattctcagaaactactttgtgatgattgcattcaagtcacagagttgaacattccctttgacagagcagtttggaaactctctttgtgtagaatctgcaagtggagatatggaccgctttgaggcctatggtagtaaaggaaatagcttcatataaaagctagacagtagcattctcagaaacttctttgtgatgcttgcattcaactcacagagttgaactttcctttcgagagagaagctttgaaacactctttttccagaatgtgcaagtggacatttggagggctttgaggcctgtggtggaaaaggaattatcttcccgtaaaagctagatagaagcattgtcagaaacttctttgagatgattgcattcaactcacagagttgaaggttccttttcaaacagcagtttccaatcactctttctgtggaatctgcaagtggatatttcgacctctttgaagatttcgttggaaacgggagaatcttcacagaaaagctaaacagaagcattctcagaaacttctctgtgatgtttgtgtttaactcccagagtttcacgttgcttttcatagagtagttctgaaacatgcttttcgtagtgtctgcaagtggacatttggagcgctttcaggcctgtggtggaaaacgaattatggtcacttaaaaactggagagaagccttctcagaaacttctctgtgatgattgcattcaactcacagagttgaaccctcctatggatagagcagtgttgaaactctctttttgtggaatctgcaagtggatatgtggacctctccgaagatgtctttggaaacgggaatatcttcacataaaaactaaacagaagcattctcagaaacttcttggtgatgtttgcattcaaatcccagagttgaaccttcctttgatagttcaggtttgaaacactctttctgtaggatctgcaagtggctatttggaccactctgtggccttcgttcgaaacgggtatatcttcgcataaaatctagacagaagcattctcagaaaatactttgtgatgattgagtttaaatcacagagctgaccattcctttggatggagcaggtttgagacacactttttgtagaatctacaagtggatatttggacctctctgaggatttcgttggaaacgggataactgcacctaactaaacggaagcattctcagaaactgctttgtgatgattgcattcatctcacagagttgaacattcctattgatagagcagtttggaaacactcttgttgtggaatgtttaagtggagatttggagcgctttgaggcctatggtagtaaagggaatagcttcatagaaaaattagacagatgcaatctcaggaactttttgctgatgtttgtattcaactcccagagttgaactttcctttggaaagagcagctatgaaacactctttttctagaatctgcaagtggatgtttggagggctttgtggtttgtggtggaaaaggaaatatcttcacctaaatactagagagaagcattctcagaagcttctctgtgatgactgcattcaactcacggagttgaacactcctattgagagcgcagttttgaaaatctctttctgtgacatctgcaaggggacatgtagaactctttgaagatttcgttggaaacggaatcatcttcacataaaaactatacaggagcagtctcagaatcgtctttgtgatgtttgcattcaaatcccagagttgaactttcctttggaagttcacgtttgaaacactctttttgcaggatctacaagtggatatttggaccactctgtgtccttcgttcgaaacgggtatatcttcacatgacatctagacagaagctttcacagaaaattctttgggatgattgagtggaagtcacagagcttaacattccttgcgatgtagcagtttagaaacacactttctgcagaatctgcaagtgcatatttggacctctctgaggaattcgttggaaacggaataatttcagctgactaaacagaagcattctcagaaccttcttcgtgatgtctgcattcaacacaaagtgtggaacttttctttgatagttcaggttttaaaaactctttttgtagaaactgcaaggggataattgcactctttgaggagtaccgtagtaaaggaaataacttcctataaaaagaagacagaagcattctcagaaccctcttcgtgatgtttgcattcaactcacggtgctgaacctttcttggatagttcagctttgaaacactctttttgtagaaactgcaagtggatatttggtcctctctgaggatttcgttggaaacgggataaaccgcacagaactaaacagaagcattctcagaaccttcttcgtgatgtttgcattcaactcacagtgttgaacctttctttgatagttcaggtttgaaacggtctttctgtagaaactgcaagtagatatttggacctctctgaggatttcgttggaaacgggataaaccgcacagaactaaaacagaagcattcacagtaaaactcttggtgacgactgagtttaactcacagagctgaacattcctttggatggagcagtttcgaaacacactatttgtagaatctgcaagtggatatttgggcctctctgaggatttcgttggaaacgggataaaccgcacagaactaaaacagaagcattctcagaaactactttgtgatgattgcattcaagtcacagagttgaacattccctttgacagagcagtttggaaactctctttgtgtagaatctgcaagtggagatatggaccgctttgaggcctatggtagtaaaggaaatagcttcatataaaagctagacagtagcattctcagaaacttctttgtgatgcttgcattcaactcacagagttgaactttcctttcgagagagaagctttgaaacactctttttccagaatctgcaagtggacatttggagggctttgaggcctgtggtggaaaaggaattatcttcccgtaaaagctagatagaagcattgtcagaaacttctttgtgatgattgcattcaactcacagagttgaaggttccttttcaaagagcagtttccaatcactctttgtgtggaatctgcaagtggatatttggacctattttgaagatttcgttggaaacgggagaatcttcacaggaaagctaaacagaagcattctcagaaacttctctgtgatgtttgtgttcaactcccagagtttcacgttgcttttcatagagtagttctgaaacatgcttttcgtagtgtctgcaagtggacatttggagcgctttcaggcctgtggtggaaaacgaattatggtcacataaaaactggagagaagccttctcagaaacttctctgtgatgattgcattcaactcacagagttgaaccctcctatggatagagcagtgttgaaactctctttttgtggaatctgcaagtggatatgtggacctctccgaagatgtctttggaaacgggaatatcttcacataaaaactaaacagaagcattctcagaaacttcttggtgatgtttgcattcaaatcccagagttgaaccttcctttgatagttcaggtttgaaacactctttctgtaggatctgcaagtggctatttggaccactctgtggccttcgttcgaaacgggtatatcttcgcataaaatctagacagaagcattctcagaaaatactttgtgatgattgagtttaactcacagagctgaacattcctttggatggagcaggtttgagacacaccttttgtagaatctacaagtggatatttggacctctctgaggatttcgttggaaacgggataactgcacctaactaaacggaagcattcccagaaactgctttgtgatgattgcattcacctcacagagttgaacattcctattgatagagcagtttggaaacactcttgttgtggaatgtgcaagtggagatttggagcgctttgaggtctatggtagtaaagggaatagcttcatagaaaaactagaccgatgcattctcaggaactttttggtgatgtttgtattccactcccagagttgaactttcctttggaaagagcagctatgaaacactctttttctagaatctgcaagtggacgtttggagggctttgtggtttgtggtggaaaaggaaatatcttcacctaaatactagatagaagcatcctcagaagcttctctgtgatgactgcattcaactcacggagttgaacactccttttgagagcgcagttttgaaactctctttctgtggcatctgcaaggggacatgtagacctctttgaagatttcgttggaaacggaatcatcttcacataaaaactatacagaagcagtctcagaatcttctttgtgatgtttgcattcaaatcccagagttgaacttgcctttcaaagttcacgtttgaaacactctttttgcaggatctacaagtggatatttggaccactctgtgtccttcgttcgaaacgggtatatcttcacatgacatctagacagaagctttctcagaaaattctttgggatgattgagttgaactcacagagctgagcattccttgcgatgtagcagtttagaaacacactttctgcagaatctgcaagtgcatatttggacctctgtgaggaattcgttggaaacgggataatttcagctgactaaacagaagcattctcagaaccttcttcgtgatgtctgcattcaactcacagtgtggaacctttctttgatagttcaggtttgaaacactctttttgtagaaactgcaaggggataattgcacttctttgaggcctaccgtagtaaaggaaataacttcctatagaaagaagacagaagcattctcagaaccctcttcgtgatgtttgcattcaactcacagtgctgaacctttctttgatagttcagctttgaaacacactttttgtagaaactgcaagtggatatttggtcctctctgaggatttcgttggaaacgggataaactgcacagaactaaacagaagcattctcagaaccttcttcgtgatgtttgcattcaactcacagtgttgaacctttctttgatagttcaggtttgaaacggtctttctgtagaaactgcaagtagatatttggacctctctgaggatttcgttggaaacgggataaaccgcacagaacaaaaacagaagcattcacagaaaacacttggtgacgactgagtttaactcacagagctgaacattcctttggatggaacagtttcgaaacacactctttgtagaatctgcaagtggatatttgggcctctctgaggatttcgttggaaacgggataaaccgcacagaactaaaacagaagcattctgagaaactactttgtgatgattgcattcaagtcacagagctgaacattccctttgatagagcagtttggaaactctctttgtgtagaatctgcaagtggagatatggaatgctttgaggactatggtagtaaaggaaatagtttcatataaaagctagacagtagcattctcagaaacttctttgtgatgcttgcattcaactcacagagttgaactttcctttcgagagagaagctttgaaacactctttttccagaatctgcaagtggacatttggagggctttgaggcctgtggtggaaaaggaattatcttcccgtaaaagctagatagaagcattgtcagaaacttctttgtgatgattgcattcaactcacagagttgaaggttccttttctaagagcagtttccaatcactctttctgtggaatctgcaagtggatatttggacctattttgaagatttcgttggaaacgggagaatcttcacagaaaagctaaacagaagcattctcagaaacttctctgtgatgtttgtgttcaactcccagagtttcacattgcttttcatagagtagttctgaaacatgcttttcgtagtgtgtacaagtgcacatttggagcgctttcaggcctgtggtggaaaacgaattatggtcacataaaaactggagagaagccttctcagaaacttctctgtgatgattgcattcaactcacagagttgaaccctcctatggatagagcagtgttgaaactctctttttgtggaatctgcaagtggatatgtggacctctccgaagatgtctttggaaacgggaatatcttcacataaaaactaaacagaagcattctcagaaacttcttggtgatgtttgcattcaaatcccagagttgaaccttcctttgatagttcaggtttgaaacactctttttgtaggatctgcaagtggatatttggaccactctgtggccttcgttcgaaacgggtacatcttcgcataaaatctagacagaagcattctcagaaaatactttgtgatgattgagtttaactcacagagctgaacattcctttggatggagcaggtttgagacacactttttgtagaatctacaagtggatatttggacctctctgaggatttcgttggaaacgcgataactgcacctaactaaacggaagcattctcagaaactgctttgtgatgattgcattcacctcacagagttgaacattcctattgatagagcagtttggaaacactcttgttgtggaatgtgcaagtggagatttggagcgctttgaggcctatggtagtaaagggaatagcttcatagaaaaactagacagatgcattctcaggaactttttggtgatgtttgtattcaactcccagagttgaactttcctttggaaagagcagctatgaaacactctttttctagaatctgcaagtggacgtttggagggctttgtggtttgtggtggaaaaggaaatatcttcacctaaatactagatagaagcattctcagaagcttctctgtgatgactgcattcaactcacggagttgaacactccttttgagagcgcagttttgaaactctctttctgtggcatctgcaaggggacatgtagacctctttgaagatttcgttggaaacggaatcatcttcacataaaaactatacagaagcagtctcagaatcttctttgtgatgtttgcattcaaatcccagagttgaacttgcctttcaaagttcacgtttgaaacactctttttgcaggatctacaagtggatatttggaccactctgtgtccttcgttcgaaacgggtatatcttcacatgacatctagacagaagctttctcagaaaattctttgggatgattgagttgaactcacagagctgaacattccttgcgatggagcagtttagaaacacactttctgcagaatctgcaagtgcatatttggacctctctgaggaattcgttggaaacgggataatttcagctgactaaacagaagcattctcagaaccttcttcgtgatgtctgcattcaactcacagtgtggaacatatctttgatacttcaggtttgaaacactctttttgtagagactgcaaggggataattgcacttctttgaggcctaccgtagtaaaggaaataacttcctataaaaagaagacagaagcattctcagaaccctcttcgtgatgtttgcattgaactcacagtgctgaacctttctttgatagttcagctttgaaacactctttttgtagaaactgcaagtggatatttggtcctctctgaggatttcgttggaaaagggataaaacgcccagaactaaacagaagcattctcagaaccttcttcgtgatgtttgcattcaactcacagtgttgaacctttctttgatagttcaggttggaaacggtctttctgtagaaactgcaagtagatatttggacctctctgaggatttcgttggaaacgggataaaccgcacagaactaaaacagaaagcattcacagaaaactcttggtgacgactgagtttaactcacagagctgaacattcctttggatggagcagtttcgaaacacactatttgtagaatgtgcaagtggatatttgggcctctctgaggatttcgttggaaacgggataaaccgcacagaactaaacagaagcattctcagaaactactttgtgatgattgcattcaagtcacagagttgaacattccctttgacagagcagtttggaaactctctttgtgtagaatctgcaagtggagatatggaccgctttgaggcctatggtagtaaaggaaatagcttcatataaaagctagacagtagcattctcagaaacttctttgtgatgcttgcattcaactcacagagttgaactttcctttcgagagagaagctttgaaacactctttttccagaatctgcaagtggacatttggagggctttgaggcctgtggtggaaaaggaattaacttcccgtaaaagctagatagaagcattgtcagaaacttctttgtgatgattgcattcaactcacagagatgaaggttcctttacaaacagcagtttccaaacactctttctgtggaatctgcaagtggatatttggacctctttgaagatttcgttggaaacgggagaatcttcacagaaaagctaaacagaagcattctcagaaacttctctgtgatgtttgtgttcaactcccagagtttcacgttgcttttcatagagtagttctgaaacatgcttttcgtagtgtctgcaagtggacatttggagcgctttcaggcctgtggtggaaaacgaattatggtcacataaaaactggagagaagccttctcagaaacttctctgtgatgattgcattcaactcacagagttgaaccctcctatggatagagcagtgttgaaactctctttttgtggaatctgcaagtggatatgtggacctctccgaagatgtctttggaaacgggaatatcttcacataaaaactaaacagaagcattctcagaaacttcttggtgatgtttgcattcaaatcccagagttgaaccttcctttgatagttcaggtttgaaacactctttttgtaggatctgcaagtggatatttggaccactctgtggccttcgttcgaaacgggtacatcttcgcataaaatctagacagaagcattctcagaaaatactttgtgatgattgagtttaaatcacagagctgaccattcctttggatggagcaggtttgagacacactttttgtagaatctacaagtggatatttggacctctctgaggatttcgttggaaacgggataactgcacctaactaaacggaagcattctcagaaactgctttgtgatgattgcattcacctcacagagttgaacattcctattgatagagcagtttggaaacactcttgttgtggaatgtgcaagtggagatttggagcgctttgaggcctatggtagtaaagggaatagcttcatagaaaaactagacagatgcattctcaggaactttttggtgatgtttgtattcaactcccagagttgaactttcctttggaaagagcagctatgaaacactctttttctagaatctgcaagtggacgtttggagggctttgtggtttgtggtggaaaaggaaatatcttcacctaaatactagacagaagcattctcagaagcttctctgtgatgactgcattcaactcacggagttgaacactccttttgagagcgcagttttgaaactctctttctgtggcatctgcaaggggacatgtagacctctttgaagatttcgttggaaacggaatcatcttcacataaaaactatacagaagcagtctcagaatcttctttgtgatgtttgcattcaaatcccagagttgaactttcctttcaaagttcacgtttgaaacactctttttgcaggatctacaagtggatatttggaccactctgtgtccttcgttcgaaacgggtatatcttcacacgacatctagacagaagctttctcagaaaattctttgggatgattgagtggaactcacagagctgaacattccttgcgatgtagcagtttagaaacacactttctgcagaatctgcaagtgcatatttggacctctctgaggaattcgttggaaacgggataatttcagctgactaaacagaagcattctcagaaccttcttcgtgatgtctgcattcaactcacagtgtggaacctttctttgatagttcaggtttgaaacactctttttgtagaaactgcaaggggataattgcacttctttgaggcctaccgtagtaaaggaaataacttcctatagaaagaagacagaagcattctcagaaccctcttcgtgatgtttgcattcaactcacggtgctgaacctttctttgatagttcagctttgaaacactctttttgtagaaactgcaagtggatatttggtcccctctgaggatttcgttggaaacgggataaaccgcacagaactaaacagaagcattctcagaaccttcttcgtgatgtttgcattcaactcacagtgttgaacctttctttgatagttcaggtttgaaacggtctttctgtagaaactgcaagtagatatttggacctctctgaggatttcgttggaaacgggataacccgcacagaactaaaacagaagcattcacagaaaactcttggtgacgactgagtttaactcacagagctggacattcctttggatggagcagttttgaaacacactatttgtagaatctgcaagtggatatttgggcccctctgaggatttcgttggaaacgggataaaccgcacagaactaaaacagaagcattctcagaaactactttgtgatgattgcattcaagtcacagagttgaacattccctttgacagagcagtttggaaactctctttgtgtagaatctgcaagtggagatatggaccgctttgaggcctatggtagtaaaggaaatagcttcatataaaagctagacagtagcattctcagaaacttctttgtgatgcttgcattcaactcacagagttgaactttcctttcgagagagaagctttgaaacactctttttccagaatctgcaagtggacatttggagggctttgaggcctgtggtggaaaaggaattaacttcccgtaaaagctagatagaagcattgtcagagacttctttgtgatgattgcattcaagtcacagagttgaaggttccttttcaaagagcagtttccaatcactctttctgtggaatctgcaagtggatatttggacctcctttgaagatttcgttggaaacgggagaatcttcacagaaaagctaaacagaagcattctcagaaacttctctgtgatgtttgtgttcaactcccagagtttcacgttgcttttcatagagtagttctgaaacatgcttttcgtagtgtctgcaagtggacatttggagcgctttcaggcctgtggtggaaaacgaattatggtcacataaaaactggagagaagccttctcagaaacttctctgtgatgattgcattcaactcacagagttgaaccctcctatggatagagcagtgttgaaactctctttttgtggaatctgcaagtggatatgtggacctctccgaagatgtctttggaaacgggaatatcttcacataaaaactaaacagaagcattctcagaaacttcttggtgatgtttgcattcaaatcccagagttgaaccttcctgtgatagttcaggtttgaaacactctttttgtaggatctgcaagtggatatttggaccactctgtggccttcgttcgaaacgggtacatcttcacataaaatctagacagaagcattctcagaaaatactttgtgatgattgagtttaaatcacagagctgaccattcctttggatggagcaggtttgagacacactttttgtagaatctacaagtggatatttggacctctctgaggatttcgttggaaacgggataactgcacctaactaaacggaagcattctcagaaactgctttgtgatgattgcattcacctcacagagttgaacattcctattgatagagcagtttggaaacactcttgttgtggaatgtgcaagtggagatttggagcgctttgaggcctatggtagtaaagggaatagcttcatagaaaaactagacagatgcattctcaggaactttttggtgatgtttgtattcaactcccagagttgaactttcctttggaaagagcagctatgaaacactctttttctagaatctgcaagtggacgtttggagggctttgtggtttgtggtggaaaaggaaatatcttcacctaaatactagatagaagcattctcagaagcttctctgtgatgactgcattcaactcacggagttgaacactccttttgagagcgcagttttgaaactctctttctgtggcatctgcaaggggacatgtagacctctttgaagatttcgttggaaacggaatcatcttcacataaaaactatacagaagtagtctcagaatcttctttgtgatgtttgcattcaaatcccagagttgaactttcctttcaaagttcacgtttgaaacactctttttgcaggatctacaagtggatatttggaccactctgtgtccttcgttcgaaacgggtatatcttcacacgacatctagacagaagctttctcagaaaattgtttgggatgattgagtggaactcacagagctgaacattccttgcgatgtagcagtttagaaacacactttctgcagaatctgcaagtgcatatttggacctctcagaggaattcgttggaaacgggataatttcagctgactaaacagaagcattctcagaaccttcttcgtgatgtctgcattcaactcacagtgtggaacctttctttgatagttcaggtttgaaacactctttttgtagaaactgcaaggggataattgcacttctttgaggcctaccgtagtaaaggaaataacttcctatagaaagaagacagaagaattctcagagccctcttcgtgatgtttgcattcaactcacagtgctgaacctttctttgatagtgcagctttgaaacactctttttgtagaaactgcaagtggatgtttggtcctctctgaggatttcgttggaaacgggataaaccgcacagaactaaaacagaagcattctcagaaccttcttcgtgatgtttgcattcaactcacagtgttgaacctttctttgatagttcaggtttgaaacggtctttctgtagaaactgcaagtagatatttggacctctctgaggatttcgttggaaacgggataaaccgcacagaactaaaacagaagcattcacagaaaactcttggtgacgactgagtttaactcacagagctgaacattcctttggatggagcagtttcgaaacacactatttgtagaatgtgcaagtggatatttgggcctctctgaggatttcgttggaaacgggataaaccgcacagaactaaacagaagcattctcagaaactactttgtgatgattgcattcaagtcacagagttgaacattccctttgacagagcagtttggaaactctctttgtgtagaatctgcaagtggagatatggaccgctttgaggcctatggtagtaaaggaaatagcttcatataaaagctagacagtagcattctcagaaacttctttgtgatgcttgcattcaactcacagagttgaactttcctttcgagagagaagctttgaaacactctttttccagaatctgcaagtggacatttggagggctttgaggcctgtggtggaaaaggaattatcttcccgtaaaagctagatagaagcattgtcagaaacttctttgtgatgattgcattcaactcacagagttgaaggttccttttcaaacagcagtttccaatcactctttctgtggaatctgcaagtggatatttcgacctctttgaagatttcgttggaaacgggagaatcttcacagaaaagctaaacagaagcattctcagaaacttctctgtgatgtttgtgttcaactcccagagtttcacattgcttctcatagagtagttctgaaacatgcttttcgtagtgtctgcaagtggacatttggagcgctttcaggcctgtggtggaaaacgaattatggtcacataaaaactggagagaagccttctcagaaacttctctgtgatgattgcattcaactcacagagttgaaccctcctatggatagagcagtgttgaaactctctttttgtggaatctgcaagtggatatgtggacctctccgaagatgtctttggaaacgggaatatcttcacataaaaactaaacagaagcattctcagaaacttcttggtgatgtttgcattcaaatcccagagttgaaccttcctttgatagttcaggtttgaaacactctttctgtaggatctgcaagtggctatttggaccactctgtggccttcgttcgaaacgggtatatcttcgcataaaatctagacagaagcattctcagaaaatactttgtgatgattgagtttaaatcacagagctgaacattcctttggatggagcaggtttgagacacactttttgtagaatctacaagtggatatttggacctctctgaggatttcgttggaaacgggataactgcacctaactaaacggaagcattctcagaaactgctttgtgatgattgcattcacctcacagagttgaacattcctattgatagagcagtttggaaacactcttgttgtggaatgtgcaagtggagatttggagcgctttgaggcctatggtagtaaagggaatagcttcatagaaaaactagacagatgcattctcaggaactttttggtgatgtttgtattcaactcccagagttgaactttcctttggaaagagcagctatgaaacactctttttctagaatctgcaagtggacgtttggagggctttgtggtttgtggtggaaaaggaaatatcttcacctaaatactagatagaagcattctcagaagcttctctgtgatgactgcattcaactcacggagttgaacactccttttgagagcgcagttttgaaactctctttctgtggcatctgcaaggggacatgtagacctctttgaagatttcgttggaaacggaatcatcttcacataaaaactatacagaagcagtctcagaatcttctttgtgatgtttgcattcaaatccccgagttgaactttcctttcaaagttcacgtttgaaacactctttttgcaggatctacaagtggatatttggaccactctgtgtccttcgttcgaaacgggtatatcttcacatgacatctagacagaagctttctcagaaaattctttgggatgattgagtggaactcacagagctgaacattccttgcgatgtagcagtttagaaacacactttctgcagaatctgcaagtgcatatttggacctctctgaggaattcgttggaaacgggataatttcagctgactaaacagaagcattctcagaaccttcttcgtgatgtctgcattcaactcacagtgtggaacctttctttgatagttcaggtttgaaacactctttttgtagaaactgcaaggggataattgcacttctttgaggcctaccgtagtaaaggaaataacttcctatagaaagaagacagaagcattctcagaaccctcttcgtgatgtttgcattcaactcacagtgctgaaactttctttgatagttcagctttgaaacactcttcttgtagaaactgcaagtggatatttggtcctctctgaggatttcgttggaaacgggataaactgcacagaactaaacagaagcattctcagaaccttcttcgtgatgtttgcattcaactcacagtgttgaacctttctttgatagttcaggttggaaacggtctttctgtagaaactgcaagtagatatttggacctctctgaggatttcgttggaaacgggataaaccgcacagaactaaaacagaagcattcacagaaaactcttggtgacgactgagtttaactcacagagctgaacattcctttggatggagcagtttcgaaacacactatttgtagaatgtgcaagtggatatttaggcctctctgaggatttcgttggaaacgggataaaccgcacagaactaaacagaagcattctcagaaactactttgtgatgattgcattcaagtcacagagttgaacattccctttgacagagcagtttggaaactctctttgtgtagaatctgcaagtggagatatggaccgctttgaggcctatggtagtaaaggaaatagcttcatataaaagctagacagtagcattctcagaaacttctttgtgatgcttgcattcaactcacagagttgaactttcctttcgagagagaagctttgaaacactctttttccagaatctgcaagtggacatttggagggctttgaggcctgtggtggaaaaggaattaacttcccgtaaaagctagatagaagcattgtcagaaacttctttgtgatgattgcattcaactcacagagttgaaggttccttttcaaacagcagtttccaatcactctttctgtggaatctgcaagtggatatttgggcctctctgaggatttcgttggaaacgggataaaacgcacagaactaaaacagaagcattctcagaaacttctctgtgatgtttgtgttcaactcccagagtttcacattgcttttcatagagtagttctgaaacatgcttttcgtagtgtctgcaagtggacatttggagcgctttcaggcctgtggtggaaaacgaattatggtcacataaaaactggagagaagccttctcagaaacttctctgtgatgattgcattcaactcacagagttgaaccctcctatggatagagcagtgttgaaactctctttttgtggaatctgcaagtggatatgtggacctctccgaagatgtctttggaaacgggaatatcttcacataaaaactaaacagaagcattctcagaaacttcttggtgatgtttgcattcaaatcccagagttgaaccttcctttgatagttcaggtttgaaacactctttctgtaggatctgcaagtggctatttggaccactctgtggccttcgttcgaaacgggtatatcttcgcataaaatctagacagaagcattctcagaaaatactttgtgatgattgagtttaaatcacagagctgaacattcctttggatggagcaggtttgagacacactttttgtagaatctacaagtggatatttggacctctctgaggatttcgttggaaacgggataactgcacctaactaaacggaagcattctcagaaactgctttgtgatgattgcattcacctcacagagttgaacattcctattgatagagcagtttggaaacactcttgttgtggaatgtgcaagtggagatttggagcgctttgaggcctatggtagtaaagggaatagcttcatagaaaaaccagacagatgcattctcaggaactttttggtgatgtttgtattcaactcccagagttgaactttcctttggaaagagcagctatgaaacactctttttctagaatctgcaagtggacgtttggagggctttgtggtttgtggtggaaaaggaaatatcttcacctaaatactagatagaagcattctcagaagcttctctgtgatgactgcattcaactcacggagttgaacactccttttgagagcgcagttttgaaactctctttctgtggcatctgcaaggggacatgtagacctctttgaagatttcgttggaaacggaatcatcttcacataaaaactatacagaagcagtctcagaatcttctttgtgatgtttgcattcaaatcccagagttgaacttgcctttcaaagttcacgtttgaaacactctttttgcaggatctacaagtggatatttggaccactctgtgtccttcgttcgaaacgggtatatcttcacatgacatctagacagaagctttctcagaaaattctttgggatgattgagtggaactcacagagctgaacattccttgcgatgtagcagtttagaaacacactttctgcagaatctgcaagtgcatatttggacctctctgaggaattcgttggaaacgggataatttcagctgactaaacagaagcattctcagaaccttcttcgtgatgtctgcattcaactcacagtgtggaacctttctttgatagttcaggtttgaaacactctttttggagaaactgcaaggggatcattgcacttctttgaggcctaccgtagtaaaggagataacttcctataaaaagaagacagaagcattctcagaaccctcttcgtgatgtttgcattcaactcacagtgctgaacctttctttgatagttcagctttgaaacactcttcttgtagaaactgcaagtggatatttggtcctctctgaggatttcgttggaaacgggataaaccgcacagaactaaacagaagcattctcagaaccttcttcgtgatgtttgcattcaactcacagtgttgaacctttctttgatagttcaggtttgaaacggtctttctgtagaaactgcaagtagatatttggacctctctgaggatttcgttggaaacgggataacccgcacagaactaaaacagaagcattcacagaaaactcttggtgacgactgagtttaactcacagagctgaacattcctttggatggagcagtttcgaaacacactatttgtagaatctgcaagtggatatttgggcctctctgaggatttcgttggaaacgggataaaacgcacagaactaaaacagaagcattctcagaaactactttgtgacgattgcattcaagtcacagagttgaacattccctttgacagagcagtttggaaactctctttgtgtagaatctgcaagtggagatatggaccgctttgaggcctatggtagtaaaggaaatagcttcatataaaagctagacagtagcattctcagaaacttctttgtgatgcttgcattcaactcacagagttgaactttcctttcgagagagaagctttgaaacactctttttccagaatctgcaagtggacatttggagggctttgaggcctgtggtggaaaaggaattatcttcccgtaaaagctagatagaagcattgtcagaaacttctttgtgatgattgcatacaagtcacagagttgaaggttccttttcaaagagcagtttccaatcactctttctgtggaatctgcaagtggatatttggacctctttgaagatttcgttggaaacgggagaatcttcacagaaaagctaaacagaagcattctcagaaacttctctgtgatgtttgtgttcaactcccagagtttcacattgcttctcatagagtagttctgaaacatgcttttcgtagtgtctgcaagtggacatttggagcgctttcaggcctgtggtggaaaacgaattatggtcacataaaaactggagagaagccttctcagaaacttctctgtgatgattgcattcaactcacagagttgaaccctcctatggatagagcagtgttgaaactctctttttgtggaatctgcaagcggatatgtggacctctccgaagatgtctttggaaacgggaatatcttcacataaaaactaaacagaagcattctcagaaacttcttggtgatgtttgcattcaaatcccagaggtgaaccttcctttgatagttcaggtttgaaacactctttttgtaggatctgcaagtggctatttggaccactctgtggccttcgttcgaaacgggtatatcttcgcataaaatctagacagaagcattctcagaaaatactttgtgatgattgagtttaaatcacagagctgaccattcctttggatggagcaggtttgagacacactttttgtagaatctacaagtggatatttggacctctctgaggatttcgttggaaacgggataactgcacctaactaaacggaagcattctcagaaactgctttgtgatgattgcattcacctcacagagttgaacattcctattgatagagcagtttggaaacactcttgttgtggaatgtgcaagtggagatttggagcgctttgaggcctatgttagtaaagggaatagcttcatagaaaaactagacagatgcattctcaggaaccttttggtgatgtttgtattcaactcccagagttgaactttcctttggaaagagcagctatgaaacactctttttctagaatctgcaagtggacgtttggagggctttgtggtttgtggtggaaaaggaaatatcttcacctaaatactagatagaagcattctcagaagcttctctgtgatgactgcattcaactcacggagttgaacactccttttgagagcgcagttttgaaactctctttctgtggcatctgcaaggggacatgtagacctctttgaagatttcgttggaaacggaatcatcttcacataaaaactatacagaagcattctcagaaccctcttcgtgatgtttgcattcaactcacagtgctgaacctttctttgatagttcagctttgaaacactctttttgtagaaactgcaagtggatatttggtcttctctgagtatttctttggaaaagggataaaccgcacagaactaaacagaagctttctcagaaaattctttgggatgattgagtagaactcacagagctgaacattcctttggatggagcagtttcgaaacacactctttgtaaaatctgcaagtggatatttcggcctctctgaggatttcgttggaaacgggataaaccgcacagaactaaaacagaagcattctcagaaccttcttcgtgatgtctgcattcaactcacagtgtggaacctttctttgatagttcaggtttgaaacactctttttgtagaaactgcaaggggataattgcacttctttgaggcctaccgtagtaaaggaaataacttcctataaaaagaagacagaagcattctcagaaccctcttcgtgatgtttgcattcaactcacagtgctgaacctttctttgatagttcagctttgaaacactctttttgtagaaactgcaagtggatatttggtcctctctgaggatttcgttggaaacgggataaaccgcacagaactaaacagaagcattctcagaaccttcttcgtgatgtttgcattcaactcacagtgttgaacctttctttgatagttcaggtttgaaatggtctttctgtagaaactgcaagtagatatttggacctctctgaggatttcgttggaaacgggataaaccgcacacaactaaaacagaagcattcacagaaaactcttggtgacgactgagtttaactcacagagctgaacattcctttggatggagcagtttcaaaacacactatttgtagaatgtgcaagtggatatgtgggcctctctgaggatttcgttggaaacgggataaaccgcacagaactaaacagaagcattctcagaaactactttgtgatgattgcattcaagtcacagagttgaacattccctttgacagagcagtttggaaactctctttgtgtagaatctgcaagtggagatatggacccctttgaggcctatggtagtaaaggaaatagcttcatataaaagctagacagtagcattctcagaaacttctttgtgatgcttgcattcaactcacagagttgaactttcccttcgagagagaagctttgaaacactctttttccagaatctgcaagtggacatttggagggctttgaggcctgtggtggaaaaggaattatcttcccgtaaaagctagatagaagcattgtcagaaacttctttgtgatgattgcattcaactcacagagttgaaggttccttttcaaagagcagtttccaatcactctttgtgtggaatctgcaagtggatatttggacctattttgaagatttcgttggaaacgggagaatcttcacaggaaagctaaacagaagcattctcagaaacttctctgtgatgtttgtgttcaactcccagagtttcacattgcttttcatagagtagttctgaaacatgcttttcgtagtgtctgcaagtggacatttggagcgctttcaggcctgtggtggaaaacgaattatggtcacataaaaactggagagaagccttctcagaaacttctctgtgatgattgcattcaactcacagagttgaaccctcctatggatagagcagtgttgaaactctctttttgtggaatctgcaagtggatatgtggacctctccgaagatgtctttggaaacgggaatatcttcacataaaaactaaacagaagcattctcagaaacttcttggtgatgtttgcattcaaatcccagagttgaaccttcctttgatagttcaggtttgaaacactctttctgtaggatctgcaagtggctatttggaccactctgtggccttcgttcgaaacgggtatatcttcgcataaaatctagacagaagcattctcagaaaatactttgtgatgattgagtttaactcacagagctgaacattcctttggatggagcaggtttgagacacactttttgtagaatctacaagtggatatttggacctctctgaggatttcgttggaaacgggataactgcacctaactaaacggaagcattctcagaaactgctttgtgatgattgcattcacctcacagagttgaacattcctattgatagagcagtttggaaacactcttgttgtggaatgtgcaagtggagatttggagcgctttgaggcctatggtagtaaagggaatagcttcatagaaaaactagacagatgcattctcaggaaccttttggtgatgtttgtattcaactcccagagttgaactttcctttggaaagagcagctatgaaacactctttttctagaatctgcaagtggacgtttggagggctttgtggtttgtggtggaaaaggaaatatcttcacctaaatactagatagaagcattctcagaagcttctctgtgatgactgcattcaactcacggagttgaacactccttttgagagcgcagttttgaaactctctttctgtggcatctgcaaggggacatgtagacctctttgaagatttcgttggaaacggaattcatcttcacataaaaactatacagaagcagtctcagaatcttctttgtgatgtttgcattcaaatcccagagttgaactttcctttcaaagttcacgtttgaaacactctttttgcaggatctacaagtggatatttggaccactctgtgtccttcgttcgaaacgggtatatcttcacacgacatctagacagaagctttctcagaaaattctttgggatgattgagtggaactcacagagctgaacattccttgcgatgtagcagtttagaaacacactttctgcagaatctgcaagtgcatatttggacctctctgaggaattcgttggaaacgggataatttcagctgactaaacagaagcattctcagaaccttcttcgtgatgtctgcattcaactcacagtgtggaacctttcattgatagttcaggtttgaaacactctttttgtagaaactgcaaggggataattgcacttctttgaggcctaccgtagtaaaggaaataacttcctatagaaagaagacagaagaattctcagagccctcttcgtgatgtttgcattcaactcacagtgctgaacctttctttgatagtgcagctttgaaacactctttttgtagaaactgcaagtggatgtttggtcctctctgaggatttcgttggaaacgggataaaccgcacagaactaaaacagaagcattctcagaaccttcttcgtgatgtttgcattcaactcacagtgttgaacctttctttgatagttcaggtttgaaacggtctttctgtagaaactgcaagtagatatttggacctctctgaggatttcgttggaaacgggataacccgcacagaactaaaacagaagcattcacagaaaactcttggtgacgactgagtttaactcacagagctgaacattcctttggatggagcagtttcgaaacacactatttgtagaatctgcaagtggatatttgggcctctctgaggatttcgatggaaacgggataaaccgcacagaactaaaacagaagcattctcagaaactactttgtgatgattgcattcaagtcacagagttgaacattccctttgacagagcagtttggaaactctctttgtgtagaatctgcaagtggagatatggaccgctttgaggcctatggtagtaaaggaaatagcttcatataaaagctagacagtagcattctcagaaacttctttgtgatgcttgcattcaactcacagagttgaactttcctttcgagagagaagctttgaaacactctttttccagaatctgcaagtggacatttggagggctttgaggcctgtggtggaaaaggaattaacttcccttaaaagctagatagaagcattgtcagaaacttctttgtgatgattgcattcaactcacagagttgaaggttccttttcaaagagcagtttccaatcactctttgtgtggaatctgcaagtggatatttggacctattttgaagatttcgttggaaacgggagaatcttcacaggaaagctaaacagaagcattctcagaaacttctctgtgatgtttgtgttcaactcccagagtttcacgttgcttttcatagagtagttctgaaacatgcttttcgtagtgtctgcaagtggacatttggagcgctttcaggcctgtggtggaaaacgaattatggtcacataaaaactggagagaagccttctcagaaacttctctgtgatgattgcattcaactcacagatttgaaccctcctatggatagagcattgttgaaactctctttttgtggaatctgcaagtggatatgtggacctctccgaagatgtctttggaaacgggaatatcttcacataaaaactaaacagaagcattctcagaaacttcttggtgatgtttgcattcaaatcccagagttgaaccttcctttgatagttcaggtttgaaacactctttctgtaggatctgcaagtggctatgtggaccactctgtggccttcgttcgaaacgggtatatcttcgcataaaatctagacagaagcattctcagaaaatactttgtgatgattgagttgaactcacagagctgaacattcctttggatggagcaggtttgagacacactttttgtagaatctacaagtggatatttggacctctctgaggatttcgttggaaacgggataactgcacctaactaaacggaagcattctcagaaactgctttgtgatgattgcattcacctcacagagttgaacattcctattgatagagcagtttggaaacactcttgttgtggaatgtgcaagtggagatttggagcgctttgaggcctgtggtagtaaagggaatagcttcatagaaaaactagacagatgcattctcaggaactttttggtgatgtttgtattcaactcccagagttgaactttcctttggaaagagcagctatgaaacactctttttctagaatctgcaagtggacgtttggagggctttgtggtttgtggtggaaaaggaaatatcttcacctaaatactagatagaagcattctcagaagcttctctgtgatgactgcattcaactcacggagttgaacactccttttgagagcgcagttttggaactctctttctgtggcatctgcaaggggacatgtagacctctttgaagatttcgttggaaacggaatcatcttcacataaaaactatacagaagcagtctcagaatcttctttgtcatgtttgcattcaaatcccagagttgaactttcctttcaaagttcacgtttgaaacactctttttgcaggatctacaagtggatatttggaccactctgtgtccttcgttcgtaacgggtatatcttcacatgacatctagacagaagctttctcagaaaattctttgggaagattgagttgaactcacagagctgaacagtccttgcgatggagcagtttagaaacacactttctgcagaatctgcaagtgcatatttggacgtctctgaggaattcgttggaaacgggataatttcagctgactaaacagaagcattctcagaaccttcttcgtgatgtctgcattcaactcacagtgtcgaacctttctttgatagttcaggtttgaaacactctttttgtagaaactgcaaggggataattgcacttctttgaggcctaccgtagtaaaggaaataacttcctataaaaagaagacagaagcattctcagaaccctcttcgtgatgtttgcattcaactcacagtgctgagcctttctttgatagttcagctttgaaacactctttttgtagaaactgcaagtggatatttggtcctctctgaggatttcgttggaaaagggataaaccgcacagaactaaacagaagcattcacagaaaactcttggtgacgactgagtttaactcacagagctgaacattcccttggttgaagcagtttcgaaacacactctttgtagaatctgcaggtggatatttgggcctctctgaggatttcgttggaaacgggataaaccgcacagaactaaaacagaagcattctcagaaactactttgtgatgtttgcattcaagtcacagagctgaacattccctttgacggagcagtttggaaactctctttgtgtagaatctgcaagtggagatatggaatgctttgaggactatggtagtaaagggaatagcttcatataaaagctagacagtagcattctcagaaacttctttgtgatgcttgcattcaactcacagagttgaacattcctttcgagagagaagctttgaaacactctttttccagaatctgcaaggggacatttggagggctttgaggcctgtggtggaaaaggaattaccttcccgtaaaagctagatagaagcattgtcagaaacttctttgtgatgattgcattcaactcacagagttgaaggttccttttcaaacagcagtttccaaacactctttctgtggaatctgcaagtggatatttggacgtctttgaagatttcgttggaaaagggataatcttcacagaaaagctaaacagaagcattctcagaaacttctctgtgatgtttgtgttcaactcccagagtttcacattgcttttcatagagtagttctgaaacatgcttttcgtagtgtctacaagtggacatttggagcgctttcaggcctgtggtggaaaacgaattatggtcacataaaaactggagagaagccttctcagaaacttctctgtgatgattgcattcaactcacagagttgaaccctcctatggatagagcagtgttgaaactctctttttgtggaatctgcaagtggatatgtggacctctccgaagatgtctttggaaacgggaatatcttcacataaaaactaaacagaagcattctcagaaacttcttggtgatgtttgcattcaaatcccagagttgaaccttcctttgatagttcaggtttgaaacactctttttgtaggatctgcaagtggctatttggaccactctgtggccttcgttcgaaacgggtatatacttcgcataaaatctagacagaagcattctcagaaaatactttgtgatgattgagtttaaatcacagagctgaccattcctttggatggagcaggtttgagacacactttttgtagaatctacaagtggatatttggacctctctgaggatttcgttggaaacgggataactgcacctaactaaacggaagcattctcagaaactgctttgtgatgattgcattcacctcacagagttgaacattcctattgatagagcagtttggaaacactcttgttgtggaatgtgcaagtggagatttggagcgctttgaggcctatggtagtaaagggaatagcttcatagaaaaactagacagatgcattctcaggaactttttggtgatgtttgtattcaactcccagagttgaactttcctttggaaagagcagctatgaaacactctttttctagaatctgcaagtggacgtttggagggctttgtggtttgtggtggaaaaggaaatatcttcacctaaatactagatagaagcatcctcagaagcttctctgtgatgactgcattcaactcacggagttgaacactccttttgagagcgcagttttgaaactctctttctgtggcatctgcaaggggacatgtagacctctttgaagatttcgttggaaacggaatcatcttcacataaaaactatacagaagcagtctcagaatcttctttgtgatgtttgcattcaaatcccagagttgaactttcctttcaaagttcacgtttgaaacactctttttgcaggatctacaagtggatatttggaccactctgtgtccttcgttcgaaacgggtatatcttcacacgacatctagacagaagctttctcagaaaattctttgggatgattgagtggaactcacagagctgaacattccttgcgatgtagcagtttagaaacacactttctgcagaatctgcaagtgcatatttggacctctctgaggaattcgttggaaacgggataatttcagctgactaaacagaagcattctcagaaccttcttcgtgatgtctgcattcaactcacagtgtggaacctttctttgatagttcaggtttgaaacactctttctgtagaaactgcaaggggataattgcactctttgaggagtaccgtagtaaaggaaataacttcctataaaaagaagacagaagcattctcagaaccctcttcgtgatgtttgcattcaactcacagtgctgaacctttctttgatagttcagctttgaaacactcttcttgtagaaactgcaagtggatatttggtcctctctgaggatttcgttggaaacgggataaaccgcacagaactaaacagaagaattctcagagccctcttcgtgatgtttgcattcaactcacagtgctgaacctttctttgatagtgcagctttgaaacactctttttgtagaaactgcaagtggatatttggtcctctctgaggatttcgttggaaacgggataaaccgcacagaactaaaacagaagagcattcacagaaaactcttggtgacgactgagtttaactcacagagctgaacattcctttggatggagcagtttcgaaacacaatatttgtagaatctgcaagtggatatttgggcctctctgaggatttcgttggaaacggggtaaaacgcacagaactaaaacagaagcattctcagaaactactttgtgatgattgcattcaagtcacagagttgaacattccctttgacagagcagtttggaaactctctttgtgtagaatctgcaagtggagatatggaccgctttgaggcctatggtagtaaaggaaatagcttcatataaaagctagacagtagcattctcagaaacttctttgtgatgcttgcattcaactcacagagttgaactttcctttcgagagagaagctttgaaacactctttttccagaatgtgcaagtggacattttgggagctttgaggcctgtggaggaaaaggaattatcttcccgtaaaagctagatagaagcattgtcagaaacttctttgtgatgattgcattcaactcacagagttgaaggttccttttcaaacagcagtttccaatcactctttctgtggaatctgcaagtggatatttgggcctctctgaggatttcgttggaaacgggataaaacgcacagaactaaaacagaagcattctcagtaaacttctctgtgatgtttgtgttcaactcccagagtttcacattgcttctcatagagtagttctgaaacatgcttttcgtagtgtctgcaagtggtcatttggagcgctttccggcctgtggtggaaaacgaattatggtcacataaaaactggagagaagccttctcagaaacttctctgtgatgattgcattcaactcacagagttgaaccctcctatggatagagcagtgttgaaactctctttttgtggaatctgcaagtggatatgtggacctctccgaagatgtctttggaaacgggaatatcttcacataaaaactaaacagaagcattctcagaaacttcttggtgatgtttgcattcaaatcccagagttgaaccttcctttgatagttcaggtttgaaacactctttttgtaggatctgcaagtggctatttggaccactctgtggccttcgttcgaaacgggtatatcttcgcataaaatctagacagaagcattctcagaaaatactttgtgatgattgagtttaactcacagagctgaacattcctttggatggagcaggtttgagacacaccttttgtagaatctacaagtggatatttggacctctctgaggatttcgttggaaacgggataactgcacctaactaaacggaagcattctcagaaactgctttgtgatgattgcattcacctcacagagttgaacattcctattgatagagcagtttggaaacactcttgttgtggaatgtgcaagtggagatttggagcgctttgaggcctatggtagtaaagggaatagcttcatagaaaaaatagacagatgcattctcaggaactttttggtgatgattgtattcaactcccagagttgaactttcctttggaaagagcagctatgaaacactctttttctagaatctgcacgtggacgtttggaggtctttgttgtttgtggtggaaaacgaaatatcttcacctaaatactagatagaagcattctcagaagcttctctgtgatgactgcattcaactcacggagttgaacactccttttgagagcgcagttttgaaactctctttctgtggcatctgcaaggggacatgtagacctctttgaagatttcgttggaaacggaatcatcttcacataaaaactatacagaagcagtctcagaatcttctttgtgatgtttgcattcaaatcccagagttgaactttcctttcaaagttcacgtttgaaacactctttttgcaggatctacaagtggatatttggaccactctgtgtccttcgttcgaaacgggtatatcttcacacgacatctagacagaagctttctcagaaaattctttgggatgagtgagtggaactcacagagctgaacattccttgcgatgtagcagtttagaaacacactttctgcagaatctgcaagtgcatatttggacctctctgaggaattcgttggaaacgggataatttcagctgactaaacagaagcattctcagaaccttcttcgtgatgtctgcattcaactcacagtgtggaacctttctttgatagttcaggtttgaaacactctttttgtagaaactgcaaggggataattgcacttctttgaggcctaccgtagtaaaggaaataacttcctatataaagaagacagaagcattctcagaaccctcttcgtgatgtttgcattcaactcacagtgctgaacctttctttgatagttcagctttgaaacactcttcttgtagaaactgcaagtggatatttggtcctctctgaggatttcgttggaaacgggataaaccgcacagaactaaacagaagcattctcagaaccttcttcgtgatgtttgcattcaactcacagtgttgaacctttctttgatagttcaggtttgaaacggtctttctgtagaaactgcaagtagatatttggacctctctgaggatttcgttggaaacgggataaaccgcacagaactaaaacagaagcattcacagaaaactcttggtgacgactgagtttaactcacagagctgaatattcctttggatggagcagtttcgaaacacactatttctagaaggtgcaagtggatatgtgggcctctctgaggatttcgttggaaacgggataaaccgcacagaactaaacagaagcattctcagaaactactttgtgatgattgcattcaagtcacagagttgaacattccctttgacagagcagtttggaaactctctttgtgtagaatctgcaagtggagatatggaccgctttgaggcctatggtagtaaaggaaatagcttcatataaaagctagacagtagcattctcagaaacttctttgtgatgcttgcattcaactcacagagttgaactttcctttcgagagagaagctttgaaacactctttttccagaatctgcaagtggacatttggagggctttgaggcctgtggtggaaaaggaattatcttcccgtaaaagctagatagaagcattgtcagaaacttctttgtgatgattgcattcaagtcacagagttgaaggttccttttcaaagagcagtttccaatcactctttctgtggaatctgcaagtggatatttggacctctttgaagatttcgttggaaacgggagaatcttcacagaaaagctaaacagaagcattctcagaaacttctctgtgatgtttgtgttcaactcccagagtttcacgttgcttttcatagagtagttctgaaacatgcttttcgtagtgtctgcaagtggacatttggagcgctttcaggcctgtggtggaaaacgaattatggtcacataaaaactggagagaagccttctcagaaacttctctgtgatgattgcattcaactcacagagttgaaccctcctatggatagagcagtgttgaaactctctttttgtggaatctgcaagtggatatgtggacctctccgaagatgtctttggaaacgggaatatcttcacataaaaactaaacagaagcattctcagaaacttcttggtgatgtttgcattcaaatcccagagttgaaccttcctttgatagttcaggtttgaaacactctttttgtaggatctgcaagtggatatttggaacactctgtggccttcgttcgaaacgggtacatcttcgcataaaatctagacagaagcattctcagaaaatactttgtgatgattgagttgaactcacagagctgaacattcctttggatggagcaggtttgagacacactatttgtagaatctacaagtggatatttggacatcgctgaggatttcgtaggaaaagggataactgcacctaactaaacggaagcattctcagaaactgctttgtgatgattgcattcacctcaaagagttgaacattactattgatagagcagtttggaaacactcttcttttggaatgtgcaagtggagatttggagcgctttgaggcctatggtagtaaagggaatagcttcataaaaaactagacagatgcattctcaggaactttttggtgatgtttgtattcaactcccagagttgaactttcctttggaaagagcagctatgaaacactctttttctagaatctgcaagtggacgtttggagggctttgtggtttgtggtggaaaaggaaatatcttcacctaaatactagatagaagcattctcagaagcttctctgtgatgactgcattcaactcacggagttgaacactccttttgagagcgcagttttgaaactctctttctgtggcatccgcaaggggacatgtagacctctttgaagatttcgttggaaacggaatcatcttcacatcaaaactatgcagaagcagtctcagaatcttctttgtgatgtttgcattcaaatcccagagttgaactttcctttcaaagttcacgtttgaaacactctttttgcaggatctacaagtggatatttggaccactctgtgtccttcgttcgaaacgggtatatcttcacacgacatctagacagaagctttctcagaaaattctttggaatgattgagtggaactcacagagctgaacattccttgcgatgtagcagtttagaaacacactttctgcagaatctgcaagtgcatatttggacctctctgaggaattcgttggaaacgggataatttcagctgactaaacagaagcattctcagaaccttcttcgtgatgtctgcattcaactcacagtgtggaacctttctttgatagttcaggtttgaaacactctttttgtagaaactgcaaggggataattgcacttctttgaggcctaccgtagtaaaggaaataacttcctatagaaagaagacagaagaattctcagagccctcttcgtgatgtttgcattcaactcacagtgctgaacctttctttgatagtgcagctttgaaacactctttttgtagaaactgcaagtggatgtttggtcctctctgaggatttcgttggaaacgggataaaccgcacagaactaaaacagaagcattctcagaacctacttcgtgatgtttgcattcaactcacagtgttgaacctttctttgatagttcaggtttgaaacggtctttctgtagaaactgcaagtagatatttggacctctctgaggatttcgttggaaaagggataaaccgctcagaactaaaacagaagcattcacagaaaactcttggtgacgactgagtttaactcacagagctgaacattcctttggatggagcagtttcgaaacacactatttgtagaatgtgcaagtggatatttaggcctctctgaggatttcgttggaaacgggataaaccgcacagaactaaacagaagcattctcagaaactactttgtgatgattgcattcaagtcacagagttgaacattccctttgacagagcagtttggaaactctctttgtgtagaatctgcaagtggagatatggaccgctttgaggcctatggtagtaaaggaaatagcttcatataaaagctagacagtagcattctcagaaacttctttgtgatgcttgcattcaactcacagagttgaactttcctttcgagagagaagctttgaaacactctttttccagaatctgcaagtggacatttggagggctttgaggcctgtggtggaaaaggaattatcttcccgtaaaagctagatagaagcattgtcagaaacttctttgtgatgattgcattcaactcacaggagttgaaggttccttttcaaacagcagtttccaatcactctttctgtggaatctgcaagtggatatttcgacctctttgaagatttcgttggaaacgggagaatcttcacagaaaagctaaacagaagcattctcagaaacttctctgtgatgtttgtgttcaactcccagagtttcacattgcttttcatagagtagttctgaaacatgcttttcgtagtgtctgcaagtggacatttggagcgctttcaggcctgtggtggaaaaccgaattatggtcacataaaaactggagagaagccttctcagaaacttctctgtgatgattgcattcaactcacagagttgaaccctcctatggatagagcattcttgaaactctctttttgtggaatctgcaagtggatatgtggacctctccgaagatgtctttggaaacgggaatatcttcacataaaaactaaacagaagcattctcagaaacttcttggtgatgtttgcattcaaatcccagagttgaaccttcctttgatagttcaggtttgaaacactctttttgtaggatctgcaagtggatatttggaccactctgtggccttcgttcgaaacgggtatatcttcgcataaaatctagacagaagcattctcagaaaatactttgtgatgattgagtttaactcacagagctgaacattcctttggatggagcaggtttgagacacactttttgtagaatctacaagtggatatttggacctctctgaggatttcgttggaaacgggataactgcacctaactaaacggaagcattctcagaaactactttgtgatgattgcattcacctcagagagttgaacattcctattgggagagcagtttggaaacactcttgctgtagaatctgcaagtggagatttggagtgctttgaggcctatggtagtaaagggaatagcttcatataaaaactagacagaagcattctcaggaaccccttggtgctgattgtattcaacttccagagttgaactttccttcggaaagagcagctatgaaacactctttttctagaatctgcaagtggatatttggagggctttgaggtttgtggtggaaaaggaaatatcttcacataaatactagatggaagcatcctcagaagcttctctgtgatgactgcattcaactcacggagttgaacactccttttgagagcgcagttttgaaactctctttctgtggcatctgcaaggggacatgtagacctctttgaagatttactttggaaacggaatcatcttcacataaaaactatacagaagcagtctcagaatcttctttgtgatgtttgcattcaaatcccagatttgaactttcctttcaaagttcaggtttgaaaccctctttttgcaggatctacaagtggatatttggaccactctgtggccttcgttcgaaacgggtatatcttcacatgacatctagacagaagctttctcagaaaattctttgggatgattgagtggaactcacagagctgaacattccttgcgatgtagcagtttagaaacacactttctgcagaatctgcaagtgcatatttggacctctctgaggaattcgttggaaacgggataatttcagctgactaaacagaagcattctcagaaccttcttcgtgatatctgcattcaactcacagtgtggaacctttctttgatagttcaggtttgaaacactctttttgtagaaactgcaaggggatcattgcacttctttgaggcctaccgtagtaaaggaaataacttcctataaaaagaagacagaagcattctcagaaccctcttcgtgatgtttgcattcaactcacggtgctgaacctttctttgatagttcagctttgaaacactctttttgtagaaactgcaagtggatatttggtcctctctgaggatttcgttggaaacgggataaaccgcacagaactaaacagaagaattctcagaaccctcttcgtgatgtttgcattcaacacacagtgctgaacctttctttgatagttcagctttgaaacactctttttgtagaaactgcaagtggatatttggtcctctctgaggatttcgttggaaacgtgataaaccgcacagaactaaacagaagcattcacagaaaactcttggtgacgtctgagtttgactcacagagctgaacattcctttggatggagcagtttcgaaacacactctttgtagaatctgcaagtggatatttaggcctctctgaggatttcgttggaaatgggataaaccgcacagaactaaaacagaagcattctcagaaactactttgtgatgattgcattcaagtcacagagttgaacattccctttgacagagcagtttggaaactctctttgtgtagaatctgcaagtggagatatggaccgctttgaggcctatggtagtaaaggaaatagcttcatataaaagctagacagtagcattctcagaaacttctttgtgatgcttgcattcaactcacagagttgaactttcctttcgagagagaagctttgaaacactctttttccagaatctgcaagtggacatttggagggctttgaggcctgtggtggaaaaggaattaacttcccgtaaaagctagatagaagcattgtcagaaacttctttgtgatgattgcattcaactcacagagttgaaggttccttttcaaacagcagtttccaatcactctttctgtggaatctgcaagtggatatttgggcctctctgaggatttcgttggaaacgggataaaacgcacagaactaaaacagaagcattctcagaaacttctctgtgatgtttgtgttcaactcccagagtttcacattgcttttcatagagtagttctgaaacatgcttttcgtagtgtctacaagtggacatttggagcgctttcaggcctgtggtggaaaacgaattatggtcacataaaaactggagagannnnnnnnnnnnnnnnnnnnnnnnnnnnnnnnnnnnnnnnnnnnnnnnnnnnnnnnnnnnnnnnnnnnnnnnnnnnnnnnnnnnnnnnnnnnnnnnnnnnagcattctcaggaactccttggtgctgtttgtattcaaattccagatttgaactttccttcggaaagagcagctatgaaacactctttttcttgaatctgcaagtggatatttggagggctttgaggtttgggatggaaaaggaaatatcttcacataaatactagatagaagcattctcagaaactactttgtgatgattgcattcacctcacagagttgaacattcctattgagagagcagtttggaaacactcttgttgtggaatgtgcaagtggagatttggagcgctttgaggtctatggtagtaaagggaatagcttcatagaaaaactagacagaagcattctcagaaaatactttgtgatgattgagtttaactcacagagctgaacattcctttggatggagcaggtgtgaaacacactttttgtagaatctgcaagtggatatttggccctttctgaggatttctttggaaacggtataaatgcacctaactaaacagaagcattctcagaaacttctttgtgatatttgcattcaaatcccagagttgaaacttcctttgataggtcaggtttgaaacactctttctgtacgatctgcaagtggatatttggaccactctgtggccttcgttcgaaacgggtacatcttcacataacatctagacagaagccttctcagaaacttctctgttgtgattgcgttcaactcacagagttgaacgctcctatggataaagcagttttgaatctctctttttggggaatctgcaagtggatatgtgaacctctttgaagatgtctttggaaacgggaatatcttcacataaaaactaaacagaaagcattctcagaaacttctctctcatgtttgcgttcacctcacagagtttcacattgcttttcatagagcagttctgaaacatgcttttcggactgtctgcaagtggacatttggagagctttcaggcctgtgttggaaaatgaattatcgtcacatagacactagagagaagcattgtcaggaacttgtttgtgatggttgcattcaactcacagagttgaaggttccttttcaaccagcagtttccaagcacgccttctgtggaatctgcaagtggatatttggacctctttgaagatatcgttggaaacgggataatcttcacagaaaagctaaacagaagcattctcagaaactcctttgtgatgtttgcattcaactcacagagttgaacattccttttgagagacaagctttgaaacactctttctctagaatctgcaagtggatatttggagggctttgaggcctgtggtggaaagggaattctcttccagtaaaaactagatagaagcattctcagaaactaatttgtgatgattgcattcaagtcacagagttgaatattccctttgacagagcactttggaaactctcgctgtgtagaatctgcaagtggagatatggaccgctttgaggcctatggtagtaaaggaaatagcttcatagaaaaactagacagtagcattctcagaaaactgtttgtgacgactgagtttaactcacaaggctgaacattcctttggatggagcagttttgaaacacactctttgtagaatctgcaagtggatatttggacctctctgaggatttcattggaaaagggataaaccgcacagaactaaacagaagcattctcagaaccttcttcgtgatgtttgcattcaactcacagtgttgaaccttttttgatagttcaggtttgaaacactctttttgtagaaactgcaagtggataattgcacttctttgaggcctatcctactaaaggaaataacttcttcatataaaatcaagacagaagctttctcagaaaatcctctgggatgattgagttgaactcacagagctgtactttccttgggatggagtagtttcgaaacacactttctgtagaatctgcaagtggatatttggacctgtctgaggaatttgttggtaacgggataatttcagctaactaaacagaagcagtctcagaatcttctttgtgatgtttgcattcaaatcccagagttgcaccttccttggaaagttcaggtttgaaaccctcttttcgcaggatctacaagtggatatttggaccaatctgtggccttcgttcgaaatgggtatatcttcacataacacctagacagaagcattctcagaaacttttctgtgatgactgcattcaactcacagggttgaacactccttttgagagcacggttttcaaactctctttctgtggaatctgcaaggggatatgtagacctctttgaaggtttcgttggaaacagaatcatcttcacataaaaattacaaggaagcattctcaggaaccccttggtgctgattgtattcaacttccagagttgaactttccttcggagagagcagctatgaaacactctttttctagaatctgcaagtggatatttggagggctttgaggtttgtggtggaaaaggaaatatcttcacataaatactagatggaagcattctcagaaactactttgtgatgattgcattcacctcacagagttgaacattcctattgagagagcagtttggaaacactcttgttggagaatctgcaagtggagatttggagcgctttgaggcctatggtactaaagggaatagcttcatataaaaactaggcagaagcattctcagaaaatactttgtgacgattgagtttaactcatagagctgaacattcctttgcatggagcagttttgaaacacactttttgtagaatctgcaagtggatatttcgacctctctgaggatttcgttggaaatgggataacgtcacctaactaaacagaccctccctctttctctctctctccctctctccctctccgtctctctctgtctctttccaggaaagatacagattgattcgctttcatataaagacatcaagataaaggcatcctgttgaaattcataaaattatcagggaccaaagctcctctctctttctgttcaatcatactcagactaggacttccgcctcaggaactgaaatgcctgaatgagctccagtcatcaactctctatttcaacaaacataaaatgcaaacatcccaaagaagtttctgccaatgcttcnnnnnnnnnnnnnnnnnnnnnnnnnnnnnnnnnnnnnnnnnnnnnnnnnnnnnnnnnnnnnnnnnnnnnnnnnnnnnnnnnnnnnnnnnnnnnnnnnnnnagccttctcagaaacttctctgtgatgattgcattcaactcacagagttgaaccctcctatagatatagcagttctgaatctctctttttgtggaatctgcaagtggatatgtggacctctttgaagatgtctttggaaacgggaatatcttcacataaaaattaaacagaagcattctcagaaacttctctctcatgtttgcgttcaactcacacagtttcacattgcttttcatagagcagttctgaaacatgcttttcggactgtctgcaagtggacatttggagagctttcaggcctgtgttggaaaatgaattatcgtcacatagacactagagagaagcattgtcaggaacttgtttgtgatggttgcattcaactcacagtgttgaaggttccttttcaaccagcagtttccaagcacgccttctgtggaatctgcaagtggatatttggacctctttgaagatatcgttggaaacgggataatcttcacagaaaagctaaacagaagcattctcagaaactcctttgtgatgtttgcattcaactcacagagttgaacattccttttgagagacaagctttgaaacactctttctctagaatctgcaagtggatatttggaggactttgaggcctgtggtggaaagggaattctcttccagtaaaaactagatagaagcattctcagaaactactttgtgatgattgcattcaagtcacagagttgaatattccctttgacagagcactttggaaactctcgttgtgtagaatctgcaagtggagatatggaccgctttgaggcctatggtagtaaaggaagttgcttcatagaaaaactagacagtagcattctcagaaaactgtttgtgacgactgagtttaactcacagggctgaacattcctttggatggagcagtttcgaaacacactctttgtagaatctgaaagtggatatttgggcctctctgaggatttcattggaaaagggataaaccgcacagaactaaacagaagcattctcagaaccttcttcgtgatgtttgcattcaactcacagtgttgaaccttttttgatagttcaggtttgaaacactctttgtgtagaaactgcaagtggataattgcacttctttgaggcctatcctactaaaggaaataacttcttcatataaaatcaagacagaagctttctcagaaaatcctctgggatgattgagttgaactcacagagctgtactttccttgggatggagtagtttcgaaacacactttctgtagaatctgcaagtggatatttggacctgtctgaggaatttgttggtaacgggataatttcagctaactaaacagaagcagtctctgaattttctttgtgatgtttgcattcaaatcccagaattgcaccttccttggaaagttcaggtttgaaaccctcattttgcaggatctacaagtggatatttggaccactctgtggccttcgttcgaaacgggtatatcttcacataacgtctagacagaagcattctcagaaacttttctgtgatgactgcattcaactcacagagttgaacactccttttgagagcgcagttttgaaactctctttctgtggaatctgcaaggggacatgtagacctctttgaaggtttcgttggaaacagaatcatcttcacaaaaaaattacacggaagcattctcaggaaccccttggtgctgattgtattcaacttccagagttgaactttccttcggagagagcagctatgaaacactctttttctagaatctgcaagtggatatttggagggctttgaggcttgtggtggaaaaggaaatatcttcacataaatactagatggaagcattctcagaaactgctttgtgatgattgcattcacctcacagagttgaacattcctattgagagagcagtttggaaacactcttgttggagaatctgcaagtggagatttggagcgctttgaggcctatggtactaaagggaatagcttcatagaaaaactaggcagaagcattctcagaaaatactttgtgatgattgagtttaactgacagagctgaacattcctttggatggagcaggtttgaaacacactttttgtagaatctgcaagtggatatttggacctctctgaggatttcgttggaaacgggataactgcacctaactaaacagaagcagtctcagaaacttctttgtgatgtttgccttcaaatcccagagttgaaccttcctttgatagttcaggtttgaaacactctttttgtaggatctgcaagtggatatttggaccactctgtggccttcattctaaacgggtatatcttcacataaaatctagacagaagccttctcagaaacttctctgtggtgatttgcgttcaactcacagagttgaacgctcctatggataaagcagttttgaatctctctttttgtggaatctgcaagtggatatgtgaacctctttgaagatgtctttggaaacgggaatatcttcacataaaaactaaacagaagcattctcagaaacttctctgtgatgtttgcgttcaactcacagagtttcacattgcttttcatagagcagttctgaaacatgcttttcggaatatctgcaagtggacatttggagagctttcaggcctgtggtggaaaacgaattatcgtcacataaaaactggagagaagcattgtcagaaacttgtttgtgatgattgcattcaactcacagagttgaaggttccctttcaaacagcagtttccaaacacactttctgtggaatctgcaattggatagttggacctctttgaagatgtctttggaaacgggataatcttcacagaaaagctaaacagaagcattgtcagaaacttctttgtgatgtttgcattctactcacagagttgaactttccttttgagagagaagctttgaaacactctttctctagaatctgcaagtggatatttggagggctttgaggcctgtggtggaaaaggaattaacttcccgtaaaaactagatagaagcattctcagaaactactttgtgatgattgcattcaagtcacagagttgaatattccctttgacagaacactttggaaactctggttgtgtagaatctgcaagtggagatatggaccgctttgaggcctatggtagtaaaggaaatagcttcatataaaaactagacagtagcattctcagaaaactgtttgtgacgactgagtttaactcacaaggctgaacattcctttggatggagcagtttcgaaacacactctttgtagaatctgcaagtggatatttgggcctctctgaggatttcattggaaaagggataagccgcacagaactaaacagaagcattctcagaaccttcttcgtgatgtttgcattcaactcacagtgttgaaccttttttgatagttcaggtttgaaacactctttgtgtagaaactgcaagtggataattgcacttctttgaggcctatcctactaaaggaaataacttcttcatataaaatcaagacagaagctttctcagaaaatcctctgggatgattgagttgaactcacagagctgtactttccttgggatggagtagtttcgaaacacactttctgtagaatctgcaagtggatatttggacctgtctgaggaatttgttggtaacgggataatttcagctaactaaacagaagcagtctctgaattttctttgtgatgtttgcattcaaatcccagaattgcaccttccttggaaagttcaggtttgaaaccctcattttgcaggatctacaagtggatatttggaccactctgtggccttcgttcgaaacgggtatatcttcacataacgtctagacagaagcattctcagaaacttttctgtgatgactgcattcaactcacagagttgaacactccttttgagagcgcagttttgaaactctctttctgtggaatctgcaaggggacatgtagacctctttgaaggtttcattggaaacagaatcatcttcacaaaaaaattacacggaagcattctcaggaaccccttggtgctgattgtattcaacttccagagttgaactttccttcggagagagcagctatgaaacactctttttctagaatctgcaagtggatatttggagggctttgaggtttgtggtggaaaaggaaatatcttcacataaatactagatggaagcattctcagaaccttctttgtgatgtttgcattcaactcacagtgttgaacctttctttgatagttcaggtttgaaacactctttttgtagaatctgcaagtggatatttggacctctttgaggcctaccatagtaaaggaaataacttcatataaaaacaagacagaagcattctcagaaaattctttgtgatgattgagtttaactcacagagctgaacattcctttgaatggaggagtttcgaaactcactttttgtagaatctgcaagtggatatttggacctctctgaggattacgttggaaacggtataatttcagctaactaaacagaagcattctcagaaacttctttgtgatatttgcattcaaatcccagagttgaaacttcctttgataggtcaggtttgaaacactctttctgtacgatctgcaagtggatatttggaccactctgtggccttcgttcgaaacgggtacatcttcacataacatctagacagaagccttctcagaaacttctctgtgatgattgcattcaactcacagagttgaaccctcctatagatatagcagttctgaatctctctttttgtggaatctgcaagtggatatgtggacctctttgaagatgtctttggaaacgggaatatcttcacataaaaattaaacagaagcattctcagaaacttctctctcatgtttgcgttcaactcacacagtttcacattgcttttcatagagcagttctgaaacatgcttttcggactgtctgcaagtggacatttggagagctttcaggcctgtgttggaaaatgaattatcgtcacatagacactagagagaagcattgtcaggaacttgtttgtgatggttgcattcaactcacagagttgaaggttccttttcaaacagcagtttccaagcacgccttctgtggaatctgcaagtggatattttgacctctttgaagatatcgttggaaacgggataatcttcacagaaaagctaaacagaagcattctgagaaactcctttgtgatgtttgcattcaactcacagagttgaacattccttttgagagacaagctttgaaacactctttctctagaatctgcaagtggatatttggagggctttgaggcctgtggtggaaagggaattctcttccagtaaaaactagatagaagcattctcagaaactactttgtgatgattacattcaagtcacagagttgaacattcactttaacagagcactttggaaactctcgttgtgtagaatctgcaagtggagctatggaccactttgaggcctatggtagtaaaggaaatagcttcatataaaaactagacagtagcattctcagaaaactctttgtgatgactgagtttaactcacagggctgaaaattcctttggatggagcaggttcgaaacacactctttgtagaatccgcaactggatatttgggcctctctgaggatttcgttagaaacgggataaaccacacagaactaaacagaagcattctcagaaccttcttcgtgatgtttgcattcaactcacagtgttgaaccttttttgatagttcaggtttgaaacactctttgtgtagaaactgcaagtggataattgcacttctttgaggcctatcctactaaaggaaataacttcttcatataaaatcaagacagaagctttctcagaaaatcctctgggatgattgagttgaactcacagagctgtactttccttgggatggagtagtttcgaaacacactttctgtagaatctgcaagtggatatttggacctgtctgaggaatttgttggtaacgggataatttcagctaactaaacagaagcagtctctgaattttctttgtgatgtttgcattcaaatcccagaattgcaccttccttggaaagttcaggtttgaaaccctcattttgcaggatctacaagtggatatttggaccactctgtggccttcgttcgaaacgggtatatcttcacataacgtctagacagaagcattctcagaaacttttctgtgatgactgcattcaactcacagagttgaacactccttttgagagcgcagttttgaaactctctttctgtggaatctgcaaggggacatgtagacctctttgaaggttttgttggaaacagaatcatcttcacataaaaattacacagaagcgttctcaggaactccttgatgttgtttgtattcaacttccagagttgaactttccttcggaaagagcagctatgaaacactctttttctagaatctgcaagtggatatttggagggctttgaggtttgtggtggaaaaggaaatatcttcacataaatactagatggaagcattctcagaaactactttgtgatgattgcattcacctcacagagttgaacattcctattgagagagcagtttggaaacactcttgttggaaaatctgcaagtggagatttggagcgctttgaggcctatggtactaaagggaatagcttcatataaaaactaggcagaagcattctcagaaaatactttgtgatgattgagtttaactcacagaggctgaacattcctttggatggagcaggtttgaaacacactttttgtagaatctgcaagtggatatttggacctctctgaggatttcgttggaaacgggataactgcacctaactaaacagaagcattctcagaaacttctttgtgatatttacattcaaatcccagagttgaaacttcctttgataggtcaggtttgaaacactctttctgtacgatctgcaagtggatatttggaccactctgtggccttcgttcgaaacgggtacatcttcacataacatctagacagaagccttctcagaaacttctctgtgatgattgcattcaactcacagagttgaaccctcctatagatatagcagttctgaatctctctttttgtggaatctgcaagtggatatgtggacctctttgaagatgtctttggaaacgggaatatcttcacataaaaattaaacagaagcattctcagaaacttctctctcatgtttgcgttcaactcacacagtttcacattgcttttcatagagcagttctgaaacatgcttttcggactgtctgcaagtggacatttggagagctttcaggcctgtgttggaaaatgaattatcgtcacatagacactagagagaagcattgtcaggaacttgtttgtgatggttgcattcaactcacagagttgaaggttccttttcaaccagcaatttccaagcacgccttctgtggaatctgcaagtggatatttggacctctttgaagatatcgttggaaacgggataatcttcacagaaaagctaaacagaagcattctcagaaactcctttgtgatgtttgcattcaactcacagagttgaacattccttttgagagacaagctttgaaacactctttctctagaatctgcaagtggatatttggagggctttgaggcctgtggtggaaagggaattctcttccagtaaaaactagatagaagccttctcagaaactactttgtgatgattgcattcaagtcacagagttgaatattccctttgacagagcactttggaaactctcgttgtgtagaatctgcaagtggagatatggaccgctttgaggcctatggtagtaaaggaaatagcttcatagaaaaactagacagtagcattctcagaaaactgtttgtgacgactgagtttaactcacaaggctgaacattcctttggatggagcagtttcgaaacacactctttgtagaatctgcaagtggatatttgggcctctctgaggatttcattggaaaagggataaaccgcacagaactaaacagaagcattctcagaaccttcttcgtgatgtttgcattcaactcacagtgttgaaccttttttgatagttcaggtttgaaacactctttttgtagaaactgcaagtggataattgcacttctttgaggcctatcctactaaaggaaataacttcttcatataaaatcaagacagaaggtttctcagaaaatcctctgggatgattgagttgaactcacagagctgtactttccttgggatggagtagtttcgaaacacactttctgtagaatctgcaagtggatatttggacctgtctgaggaatttgttggtaacgggataatttcagctaactaaacagaagcagtctctgaattttctttgtgatgtttgcattcaaatcccagaattgcaccttccttggaaagttcaggtttgaaaccctcattttgcaggatctacaagtggatatttggaccactctgtggccttcgttcgaaacgggtatatcttcacataacgtctagacagaagcattctcagaaacttttctgtgatgactgcattcaactcacagagttgaacactccttttgagagcgcagttttgaaactctctttctgtggaatctgcaaggggacatgtagacctctttgaaggtttcgttggaaacagaatcatcttcacaaaaaaattacacggaagcattctcaggaacccctttgtgctgattgtattcaacttccagagttgaactttccttcggagagagcagctatgaaacactctttttctagaatctgcaagtggatatttggagggctttgaggtttgtggtggaaaaggaaatatcttcacataaatactagatggaagcattctcagaaactactttgtgatgattgcattcacctcacagagttgaacattcctattgagagagcagtttggaaacactcttgttggagaatctgcaagtggagatttggagcgctttgaggcctatggtactaaagggaatagcttcatataaaaactaggcagaagcattctcagaaaatactttgtgatgattgagtttaactcacagagctgaacattcctttggatggagcaggtttgaaacacactttttgtagaatctgcaagtggatatttggacctctctgattatttcgttggaaacgggataactgcacctaactaaacagaagcattctcagaaacttctttgtgatatttgcattcaaatcccagagttgaaacttcctttgataggtcaggtttgaaacactctttctgtacgatctgcaagtggatatttggaccactctgtggccttcgttcgaaacgggtacatcttcacataacatctagacagaagccttctcagaaacttctctgtgatgattgcattcaactcacagagttgaaccctcctatagatatagcagttctgaatctctctttttgtggaatctgcaagtggatatgtggacctctttgaagatgtctttggaaacgggaatatcttcacataaaaattaaacagaagcattctcagaaacttctctctcatgtttgcgttcaactcacacagtttcacattgcttttcatagagcagttctgaaacatgcttttcggactgtctgcaagtggacatttggagagctttcaggcctgtgttggaaaatgaattatcgtcacatagacactagagagaagcattgtcaggaacttgtttgtgatggttgcattcaactcacagagttgaaggttccttttcaaacagcagtttccaagcacgccttctgtggaatctgcaagtggatatttggacctctttgaagatatcgttggaaacgggataatcttcacagaaaagctaaacagaagcattctcagaaactcctttgtgatgtttgcattcaactcacagagttgaacattccttttgagagacaagctttgaaacactctttctctagaatctgcaagtggatatttggagggctttgaggcctgtggtggaaagggaattctcttccagtaaaaactagatagaagcattctcagaaactactttgtgatgattgcattcaagtcacagagttgaatattccctttgacagagcactttggaaactctcgctgtgtagaatctgcaagtggagatatggaccgctttgaggcctatggtagtaaaggaaatagcttcatagaaaaactagacagtagcattctcagaaaactgtttgtgacgactgagtttaactcacaaggctgaacattcctttggatggagcagtttcgaaacacacactttgtagaatctgcaagtggatatttgggcctctctgaggatttcattggaaaagggataaaccgcacagaactaaacagaagtattctcagaaccttcttcgtgatgtttgcattcaactcacagtgttgaacctttctttgatagttcaggtttgaaacaatctttttgtagaaactgtaagtggataattgcacttctttgaggcctatcgtagtaaaggaaataacttcatatataaacaagacagaagctttctcagaaaatcctctgggatgatagagttgaactcacagagctgtactttccttggggtggagtagtttcgaaacacactttctgtagaatctgcaagtggatatttggagctgtctgaggtattcgttggaaacttggtaatttcatctaactaaacagaagcagtctctgaattttctttgtgatgtttgcattcaaatcccagaattgcacattccttggaaagttcaggtttgaaaccctcattttgcaggatctacaagtggatatttggaccactctgtggccttcgttcgaaacgggtatatcttcacataacgtctagacagaagcattctcagaaacttttctgtgatgactgcattcaactcacagagttgaacactccttttgagagcgcagttttgaaactctctttctgtggaatctgcaaggggacatgtagacctctttgaaggtttcgttggaaacagaatcatcttcacaaaaaaattacacggaagcattctcaggaaccccttggtgctgattgtattcaacttccagagttgaactttccttcggagagagcagctatgaaacactctttttcgagaatctgcaagtggatatttggagggctttgaggtttgtggtggaaaaggaaatatcttcacataaatactagatggaagcattctcagaaactactttgtgatgattgcattcacctcacagagttgaacattcctattgagagagcagtttggaaacactcttgttggagaatctgcaagtggagatttggagcgctttgaggcctatggtactaaagggaatagcttcatataaaaactaggcagaagcattctcagaaaatactttgtgatgattgagtttaactcacagagctgaacattcgtttggatggagcaggtttgaaacacactttttgtagaatctgcaagtggatatttggacctctctgaggatttcgttggaaacgggataactgcacctaactaaacagaagcattctcagaaacttctttgtgatatttgcattcaaatcccagagttgaaacttcctttgataggtcaggtttgaaacactctttctgtacgatctgcaagtggatatttggaccactctgtggccttcgttcgaaacgggtacatcttcacataacatctagacagaagccttctcagaaacttctctgtgatgattgcattcaactcacagagttgaaccctcctatagatatagcagttctgaatctctctttttgtggaatctgcaagtggatatgtggacctctttgaagatgtctttggaaacgggaatatcttcacataaaaattaaacagaagcattctcagaaacttctctctcatgtttgcgttcaactcacacagtttcacattgcttttcatagagcagttctgaaacatgcttttcggactgtctgcaagtggacatttggagagctttcaggcctgtgttggaaaatgaattatcgtcacatagacactagagagaagcattgtcaggaacttgtttgtgatggttgcattcaactcacagagttgaaggttccttttcaaccagcagtttccaagcacgccttctgtggaatctgcaagtggatatttggacctctttgaagatatcgttggaaacgggataatcttcacagaaaagctaaacggaagcattctcagaaactcctttgtgatgtttgcattcaactcacagagttgaacattccttttgagagacaagctttgaaacactctttctctagaatctgcaagtggatatttggagggctttgaggcctgtggtggaaagggaattctcttccagtaaaaactagatagaagcattctcagaaactactttgtgatgattgcattcaagtcacagagttgaatattccctttgacagagcactttggaaactctcgctgtgtagaatctgcaagtggagatatggaccgctttgaggcctatggtagtaaaggaaatagcttcatagaaaaactagacagtagcattctcagaaaactgtttgtgacgactgagtttaactcacaaggctgaacattcctttggatggagcagtttcgaaacacactctttgtagaatctgcaagtggatatttgggcctctctgaggatttcattggaaaagggataaaccgcacagaactaaacagaagcattctcagaaccttcttcgtgatgtttgcattcaactcacagtgttgaaccttttttgatagttcaggtttgaaacactctttttgtagaaactgcaagtggataattgcacttctttgaggcctatcctactaaaggaaataacttcttcatataaaatcaagacagaagctttctcagaaaatcctctgggatgattgagttgaactcacagagctgtactttccttgggatggagtagtttcgaaacacactttctgtagaatctgcaagtggatatttggacctgtctgaggaatttgttggtaacgggataatttcagctaactaaacagaagcagtctctgaattttctttgtgatgtttgcattcaaatcccagaattgcaccttccttggaaagttcaggtttgaaaccctcattttgcaggatctacaagtggatatttggaccactctgtggccttcgttcgaaacgggtatatcttcacataacgtctagacagaagcattctcagaaacttttctgtgatgactgcattcaactcacagagttgaacactccttttgagagcgcagttttgaaactctctttctgtggaatctgcaaggggacatgtagacctctttgaaggtttcgttggaaacagaatcatcttcacaaaaaaattacacggaagcattctcaggaaccccttggtgctgattgtattcaacttccagagttgaactttccttcggaaagagcagctatgaaacactctttttctagaatctgcaagtggatatttggagggctttgaggtttgtggtggaaaaggaaatatcttcacataaatactagatggaagcattctcagaaactactttgtgatgattgcattcacctcacagagttgaacattcctattgagagagcagtttggaaacactcttgttggagaatctgcaagtggagatttggagcactttgaggcctctggtactaaagggaatagcttcatataaaaactaggcagaaacattctcagaaaatactctttgatgattgagtttaactcacagagctgaacattcctttggatggagcaggttttaatcacactttttgtagaatctgcaagtggatatttggacctctctgaggatttcgttggaaacgggataactgcacctaactaaacagaagcattctcagaaacttctttgtgatgtttgcattcagatcccagagttagaccttcctttgatagttcaggtttgaatcactctttttgtaggatctgcaagtggatatttggaccactctgtggccttcgttggaaacgggtacaacttcacataacatctagacagaatccttctcagaaacttctctgtggtgattgcgttcaactcacagagttgaacgctcctatggataaagcagttttgaatctctctttttgtggaatctgcaagtggatatgtgaacctctttgaagatgtctttggaaacgggaatatcttcacataaaaactaaacagaagcattctcagaaacttctctgtgatgtttgcgttcaactcacagagtttcacattgcttttcatagagcagttctgaaacatgcttttcggaatatctgcaagtggacatttggagagctttcaggcctgtggtggaaaacgaattatcgtcacataaaaactagagagtagcattgtcaggaacttgtttgtgatggttgcattcaactcacagagttaaaggttccttttcaaccagcagtttccaagcacgccttctgtggaatctgcaagtggatatttggacctctttgaagatatcattggaaacgggataatcttcacagaaaagctaaacagaagcattctcagaaacttctttgtgatgtttgcattcaactcacagagttgaacattccttttgagagacaagctttgaaacactctttctctagaatctgcaagtggatatttggagggatttgaggcctgtggtggaaagggaattatcttccagtaaaaactagatagaagcattctcagaaactaatttgtgatgattgcattcaagtcacagagttgaatattccctttgacagagcactttggaaactctcgttgtgtagaatctgcaagtggagatatggaccgctttgaggcctatggtagtaaaggacgttgcttcatagaaaaactagacagtagcattctcagaaaactctttgtgacgactgagtttaactcacagggctaaacattgccttggatggagcagtttcgaaacaaactatttgtagaatctgcaagtggatatttggacctctctgaggatttcgttggaaacgggaaaactgcacctaactaaacagaagcattctcagaaccttcttcgtgaggtttgcattcaactcacagtgttgaacctttctttgatagttcaggtttgaaacactctttttgtagaaactgcaagtggataattgcacttctttgaggcctatcgtagtaaaggaaatatcttcatataaaaacaagacagaagctttctcagaaaatcctctgggatgattgagttgaactcacagagctgtactttccttgggatggagcagtttcgaaacacactttctgtagaatctgcaagtggatatttggacctgtctgaggaattcgttggaaacgtgataatttcagctaactaaacagaagcagactccgaatcttctttgtgatgtttgcattcaaatcccagagttgcactttccttggaaatttcaggtttgaaaccctctttttgcaggatctacaagtggatatttggaccactctgtggccttcattcgaaacgggtataccttcacataacatctagacagaagcattctcagaaacttttctgtgatgactgcattcaactcacagagttgaacactccttttgagagcgcagttttgaaactctctttctgtggaatctgcatggggacatgtagacctctttgaaggtttcgttggaaacagaatcatcttcacaaaaaaattacacggaaacattctcaggaaccccttggtgctgtttgtattcaacttccagagttgaacattccttcggaaagagcagctacgaaacaacctttttctagaatctgcaagtggatatttggagggctttgaggtttgtggtggaaaaggaaatatcttcacataaatactagatggaagcattctcagaacctacttggtgatgattccattcaactcacagaattgaacattcctattgatagagcagtttggaaactctctttttgtagaatctgcaagtggagatgtggagcactttgaggcctgtggtagtaaaggaaatagcttcatataaaaactagacagaagcattctcagaaaatactttgtgatgattgagtgtaactcacagagctgaacattcctttggatggggcagttttgaaacacactttttgtagcatctgcaagtggatatttggacctctctgaggatttcgttggaaacgggataacgtcacctaactaaacagaagcattctcagaaacttctttgtgatatttgcattcaaatcccagagttgaaacttcctttgataggtcaggtttgaaacactctttctgtacgatctgcaagtggatatttggaccactctgtggccttcgttcgaaacgggtacatcttcacataacatctagacagaagccttctcagaaacttctctgtgatgattgcattcaactcacagagttgaaccctcctatagatatagcagttctgaatctctctttttgtggaatctacaagtggatatgtggacctctttgaagatgtctttggaaacgggaatatcttcacataaaaattaaacagaagcattctcagaaacttctctgtgatgtttgcgttcaactcacagagtttcacattgcttttcatagagcagttctgaaacatgcttttcggaatatctgcaagtggacatttggagagctttcaggcctgtggtggaaaatgaattatcgtcacataaaaactagagagtagcattgtcagaaacttatttgtgatgattgcgttcaacccacagtgttgaagattccttttcaaacagcagtttcgacacactctttctgtggaatctgcaagtggatatttggacctctctgaggatttagttggaaaagggataaacctcacataactaaacagaagcattctcagaacctacttggtgatgattccattcaactcacagaattgaacattcctattgatagagcagtttggaaactctctttttgtagaatctgcaagtggagatgtggagcactttgaggcctgtggtagtaaaggaaatagcttcatataaaaactagacagaagaattctcagaaaatactttgtgatgattgagtgtaactcacagagctgaacattcctttggatggaggagttttgaaacacactttttgtagcatctgcaagtggatatttggacctctctgaggatttcgttggaaacgggataacgtcacctaactaaacagaagcagtctcagaaacttctttgtgatgtttgcattcaaatcccagacttgaaccttcctttgatagttcaggtttgaaaccctctttttgtaggatctgccagtggatatttggaccactttgtggccttcattcgaaacgggtataccttcacataaaatctagacagaagccttctcagaaacttctctgtgatgattgcattcaactcacagagttgaaccctcctatagatatagcagttctgaatctctctttttgtggaatctgcaagtggatatgtggacctctttgaagatgtctttggaaacgggaatatcttcacataaaaattaaacagaagcattctcagaaacttctctctcatgtttgcgttcaactcacacagtttcacattgcttttcatagagcagttctgaaacatgcttttcggactgtctgcaagtggacatttggagagctttcaggcctgtgttggaaaatgaattatcgtcacatagacactagagagaagcattgtcaggaacttgtttgtgatggttgcattcaactcacagagttgaaggttccttttcaaccagcagtttccaagcacgccttctgtggaatctgcaagtggatatttggacctctttgaagatatcgttggaaacgggataatcttcacagaaaagctaaacagaagcattctcagaaactcctttgtgatgtttgcattcaactcacagagttgaacattccttttgagagacaagctttgaaacactctttctctagaatctgcaagtggatatttggagggctttgaggcctgtgctggaaagggaattctcttccagtaaaaactagatagaagcattctcagaaactactttgtgatgattgcattcaagtcacagagttgaatattccctttgacagagcactttggaaactctcgctgtgtagaatctgcaagtggagatatggaccgctttgaggcctatggtagtaaaggaaatagcttcatagaaaaactagacagtagcattctcagaaaactgtttgtgacgactgagtttaactcacaaggctgaacattcctttggatggagcagtttcgaaacacactctttgtagaatctgcaagtggatatttgggcctctctgaggatttcattggaaaagggataagccgcacagaactaaacagaagcattctcagaaccttcttcgtgatgtttgcattcaactcacagtgttgaaccttttttgatagttcaggtttgaaacactctttgtgtagaaactgcaagtggataattgcacttctttgaggcctatcctactaaaggaaataacttcttcatataaaatcaagacagaagctttctcagaaaatcctctgggatgattgagttgaactcacagagctgtactttccttgggatggagtagtttcgaaacacactttctgtagaatctgcaagtggatatttggacctgtctgaggaatttgttggtaacgggataatttcagctaactaaacagaagcagtctctgaattttctttgtgatgtttgcattcaaatcccagaattgcaccttccttggaaagttcaggtttgaaaccctcattttgcaggatctacaagtggatatttggaccactctgtggccttcgttcgaaacgggtatatcttcacataacgtctagacagaagcattctcagaaacttttctgtgatgactgcattcaactcacagagttgaacactccttttgagagtgcagttttgaaactctctttctgtggaatctgcaaggggacatgtagacctctttgaaggtttcgttggaaacagaatcatcttcacaaaaaaattacacggaagcattctcaggaaccccttggtgctgattgtattcaacttccagagttgaactttccttcggagagagcagctatgaaacactctttttctagaatctgcaagtggatatttggagggctttgaggtttgtggtggaaaaggaaatatcttcacataaatactagatggaagcattctcagaaactactttgtgatgattgcattcacctcacagagttgaacattcctattgagagagcagtttggaaacactcttgttggagaatctgcaagtggagatttggagcgctttgaggcctatggtactaaagggaatagcttcatataaaaactaggcagaagcattctcagaaaatactttgtgatgattgagttgaactcacagagctgaacattcctttggatggagcaggtttgaaacacactttttgtagaatctgcaagtggatatttggacctctctgaggatttcgttggaaacgggataactgcacctaactaaacagaagcattctcagaaacttctttgtgatatttgcattcaaatcccagagttgaaacttcctttgataggtcaggtttgaaacactctttctgtacgatctgcaagtggatatttggaccactctgtggccttcgttcgaaacgggtacatcttcacataacatctagacagaagccttctcagaaacttctctatgatgattgctttcaactcacagagttgaaccctcctatggatatagcagttctgaatctctctttttgtggaatctgcaagtggatatgtggacctctttgaagatgtctttggaaacgggaatatcttcacataaaaattaaacagaagcattctcagaaacttctctctgatgtttgcgttcaactcacacagtttcacattgcttttcatagagcagttctgaaacatgcttttcggagtgtctgcaagtgaacatttggagagctttcaggcctgtgttgggaaatgtattatcgtcacataaacactagagagaagcattgtcaggaacttgtttgtgatggttgcattcaactcacagagttaaaggttccttttcaaccagcagtttccaagcacgccttctgtggaatctgcaagtggatatttggacctctttgaagatatcattggaaacgggataatcttcacagaaaagctaaacagaagcattctcagaaacttctttgtgatgtttgcattcaactcacagagttgaacattccttttgagagacaagctttgaaacactctttctctagaatctgcaagtggatatttggagggatttgaggcctgtggtggaaagggaattatcttccagtaaaaactagatagaagcattctcggaaactgctttgtgatgattgcattcaagtcacagagttgaacattccctttgacagagcactttggaaactctcgttgtgtagaatctgcaagtggagatatggaccgctttgaggcctatggtagtaaaggaaatagcttcatgtaaaaactggacagtagcattctcagaaaaccctttgtggcgactgagtttaactcacagggctcaacattcctttggatggagaagtttcgaaacacactctttgtagaatctgcaagtggatatttgggcctctctgaggatttcgttggaaacgggataaaccgcacagaaataaatagaagcattctcagaaccttcttcgtgatgtttgcattcaactcacagtgttgaaccttttttgatagttcaggtttgaaacactctttgtgtagaaactgcaagtggataattgcacttctttgaggcctatcctactaaaggaaataacttcttcatataaaatcaagacagaagctttctcagaaaatcctctgggatgattgagttgaactcacagagctgtactttccttgggatggagtagtttcgaaacacactttctgtagaatctgcaagtggatatttggacctgtctgaggaatttgttggtaacgggataatttcagctaactaaacagaagcagtctctgaattttctttgtgatgtttgcattcaaatcccagaattgcaccttccttggaaagttcaggtttgaaaccctcattttgcaggatctacaagtggatatttggaccactctgtggccttcgttcgaaacgggtatatcttcacataacgtctagacagaagcattctcagaaacttttctgtgatgactgcattccactcacagagttgtacactccttttgagagcgcagttttgaaactctctttctgtggaatctgcaaggggacatgtagacctctttgaaggtttcgtttggaaacggaatcatcttcacataaaaattacacagaagcattctcaggaaccccttggtgctgattgtattcaacttccagagttgaactttccttcggagagagcagctatgaaacactctttttctagaatctgcaagtggatatttggagggctttgaggtttgtggtggaaaaggaaatatcttcacataaatactagatggaagcattctcagaaactactttgtgatgattgcattcacctcacagagttgaacattcctattgagagagcagtttggaaacactcttgttggagaatctgcaagtggagatttggagcgctttgaggcctatggtactaaagggaatagcttcatataaaaactaggcagaagcattctcagaaaatactttgtgatgattgagtgtaactcacagagctgaacattcctttgaatggagcagttttgaaacacactttttgtagcatctgcaagtggatatttggacctctccgaggatttcgttggaaacgggataacgtcacctaactaaacagaccctccctctttctctctctctccctctctccctctccgtctctctctgtctctttccaggaaagatacagattgattcgctttcatataaagacatcaagataaaggcatcctgttgaaattcataaaattatcagggaccaaagctcctctctctttctgttcaatcatactcagactaggacttccgcctcaggaactgaaatgcctgaatgagctccagtcatcaactctctatttcaacaaacataaaatgcaaacatcccaaagaagtttctgccaatgcttcnnnnnnnnnnnnnnnnnnnnnnnnnnnnnnnnnnnnnnnnnnnnnnnnnnnnnnnnnnnnnnnnnnnnnnnnnnnnnnnnnnnnnnnnnnnnnnnnnnnnagccttctcagaaacttctctgtgatgattgcattcaactcacagagttgaaccctcctatagatatagcagttctgaatctctctttttgtggaatctgcaagtggatatgtggacctctttgaagatgtctttggaaacgggaatatcttcacataaaaattaaacagaagcattctcagaaacttctctctcatgtttgcgttcacctcacagagtttcacattgcttttcatagagcagttctgaaacatgcttttcggactgtctgcaagtggacatttggagagctttcaggcctgtgttggaaaatgaattatcgtcacatagacactagagagaagcattgtcaggaacttgtttgtgatggttgcattcaactcacagagttgaaggttccttttcaaccagcagtttccaagcacgccttctgtggaatctgcaagtggatatttggacctctttgaagatatcgttggaaacgggataatcttcacagaaaagctaaacagaagcattctcagaaactcctttgtgatgtttgcattcaactcacagagttgaacattccttttgagagacaagctttgaaacactctttctctagaatctgcaagtggatatttggagggctttgaggcctgtggtggaaagggaattctcttccagtaaaaactagatagaagcattctcagaaactactttgtgatgattgcattcaagtcacagagttgaatattccctttgacagagcactttggaaactctcgctgtgtagaatctgcaagtggagatatggaccgctttgaggcctatggtagtaaaggaaatagcttcatagaaaaactagacagtagcattctcagaaaactgtttgtgacgactgagtttaactcacaaggctgaacattcctttggatggagcagtttcgaaacacactctttgtagaatctgcaagtggatatttgggcctctctgaggatttcattggaaaagggataagctgcacagaactaaacagaagcattctcagaaccttcttcgtgatgtttgcattcaactcacagtgttgaaccttttttgatagttcaggtttgaaacactctttgtgtagaaactgcaagtggataattgcacttctttgaggcctatcctactaaaggaaataacttcttcatataaaatcaagacagaagctttctcagaaaatcctctgggatgattgagttgaactcacagagctgtactttccttgggatggagtagtttcgaaacacactttctgtagaatctgcaagtggatatttggacctgtctgaggaatttgttggtaacgggataatttcagctaactaaacagaagcagtctctgaattttctttgtgatgtttgcattcaaatcccagaattgcaccttccttggaaagttcaggtttgaaaccctcattttgcaggatctacaagtggatatttggaccactctgtggccttcgttcgaaacgggtatatcttcacataacgtctagacagaagcattctcagaaacttttctgtgatgactgcattcaactcacagagttgaacacttcttttgagagcgcagttttgaaactctctttctgtggaatctgcaaggggacatgtagacctctttgaaggtttcgttggaaacagaatcatcttcacaaaaaaattacacggatgcattctcaggaactttttggtgatgtttgtattcaactcccagagttgaactttcctttggaaagagcagctatgaaacactctttttctagaatctgcaagtggacgattggagggctttgtggtttgtggtggaaaaggaaatatcttcacctaaatactagagagaagcattctcagaaactactttgtgatgattgcattcacctcacagagttgaacattcctattgagagagcagtttggaaacactcttgttggagaatctgcaagtggagatttggagcgctttgaggcctatggtactaaagggaatagcttcatataaaaactaggcagaagcattctcagaaaatactttgtgatgattgagtttaactcacagagctgaacattcctttggatggagcaggtttgaaacacactttttgtagaatctacaagtggatatttcgacctctctgaggatttcgttggaaacgggataactgcacctaactaaacggaagcattctcagaaacttcttggtgatgtttgcattcaaatcccagagttgaaacttcctttgataggtcaggtttgaaacactctttctgtacgatctgcaagtggatatttggaccactctgtggccttcgttcgaaacgggtacatcttcacataacatctagacagaagccttctcagaaacttctctgtgatgattgcattcaactcacagagttgaaccctcctatagatatagcagttctgaatctctctttttgtggaatctgcaagtggatatgtggacctctttgaagatgtctttggaaacgggaatatcttcacataaaaattaaacagaagcattctcagaaacttctctctcatgtttgcgttcaactcacacagtttcacattgcttttcatagagcagttctgaaacatgcttttcggactgtctgcaagtggacatttggagagctttcaggcctgtgttggaaaatgaattatcgtcacatagacactagagagaagcattgtcaggaacttgtttgtgatggttgcattcaactcacagagttgaatgttccttttcaaacagcagtttccaagcacgccttctgtggaatctgcaagtggatatttggacctctttgaagatatcgttggaaacgggataatcttcacagaaaagctaaacagaagcattctcagaaactcctttgtgatgtttgcattcaactcacagagttgaacattccttttgagagacaagctttgaaacactctttctctagaatctgcaagtggatatttggagggctttgaggcctgtgctggaaagggaattctcttccagtaaaaactagatagaagcattctcagaaactactttgtgatgattgcattcaagtcacagagttgaatattccctttgacagagcactttggaaactctcgctgtgtagaatctgcaagtggagatatggaccgctttgaggcctatggtagtaaaggaaatagcttcatagaaaaactagacagtagcattctcagaaaactgtttgtgacgactgagtttaactcacaaggctgaacattcctttggatggagcagtttcgaaacacactctttgtagaatctgcaagtggatatttgggcctctctgaggatttcattggaaaagggataagccgcacagaactaaacagaagcattcccagaatcttcttcgtgatgtttgccttcaactcacagtgttgaacctttctttgatagttcaggtttgaaacactctttttgttcaaacttcaagtggataattgcacttctttgaggcctatgctagtaaaggaaataacttcatctaaaaacaagacagaagctttctcagaaaatcctctgggatgattgagttgaactcacagagctgtactttccttgggatggagtagtttcgaaacacactttatgtagaatctgcaagtggatatttggacctgtctgaggaattcgttggaaacgggataatttcagctaactaaacagaagcagtctcagaatcttctttgtgatgtttgcattcaaatcccagagttgcaccttccttggaaagttcagttttgaaaccctctttttccaggacctacaagtggatatttggaccactctgtggccttcgttcgaaacgggtatatcttcacataacatctagacagaagcactctcagaagcttctctgtgatgactgcattcaactcacggagttgaacactccttttgagagtgcagtttcgaatctctctttctgtggaatctgcaaggggacatgtagacctctttgaaggtttcgttggaaacagaatcatcttcacataaaaattacagggaagcattctcaggaaccccttggtgctgtttgtattcaacttccagagtcgaactttccttcggaaagagcagctacgaatcactcattttccagaatctgcaagtggatatttggagggctttgaggtttgtggtggaaaaggaaatatcttcacataaacactagatgggagcattctcagaaactactttctgatgattgcattcacctcacagagttgaacattcctatttagagagcagtttggaaacactcttgttggagaatctgcaagtggagatttggagcgctttgaggcctatggtactaaagggaatagcttcatataaaaactagacagaagcattctcagaaaatactttgtgatgattgagtttaactcacagagctgaacattcctttggatggagcaggtttgaaacacactttttgtagaatctgcaagtggatatttggacctctctgaggatttcgttggaaacgggataactgcacctaactaaacagaagcattctcagaaacttctttgtgatatttgcattcaaatcccagagttgaaacttcctttgataggtcaggtttgaaacactctttctgtacgatctgcaagtggatatttggaccactctgtggccttcgttgtaaacgggtacaacttcacataacatctagacagaagccttctcagaaacttctctgtgatgattgcattcaactcacagagttgaaccctcctatggatatagcagttctgaatctctctttttgtggaatctgcaagtggatatgtggacctctttgaagatgtctttggaaacgggaatatcttcacataaaaattaaacagaagcattctcagaaacttctctctcatgtttgcgttcaactcacacagtttcacattgcttttcatagagcagttctgaaacatgcttttcggactgtctgcaagtggacatttggagagctttctggcctgtgttggaaaatgaattatcgtcacatagacactagagagaagcattgtcaggaacttgtttgtgatggttgcattcaactcacagagttgaaggttccttttcaaacagcagtttccaagcacgccttctgtggaatctgcaagtggatatttggacctctttgaagatatcgttggaaacgggataatcttcacagaaaagctaaacagaagcattctcagaaactcctttgtgatgtttgcattcaactcacagagttgaacattccttttgagagacaagctttgaaacactctttctctagaatctgcaagtggatatttggagggctttgaggcctgtggtggaaagggaattctcttccagtaaaaactagatagaagcattctcagaaactactttgtgatgattgcattcaagtcacagagttgaatattccctttgacagagcactttggaaactctcgctgtgtagaatctgcaagtggagatatggaccgctttgaggcctatggtagtaaaggaaatagcttcatagaaaaactagacagtagcattctcagaaaactgtttgtgacgactgagtttaactcacaaggctgaacattcctttggatggagcagtttcgaaacacactctttgtagaatctgcaagtggatatttgggcctctctgaggatttcattggaaaagggataagccgcacagaactaaacagaagcattctcagaaccttcttcgtgatgtttgcattcaactcacagtgttgaaccttttttgatagttcaggtttgaaacactctttgtgtagaaactgcaagtggataattgcacttctttgaggcctatcctactaaaggaaataacttcttcatataaaatcaagacagaagctttctcagaaaatcctctgggatgattgagttgaactcacagagctgtactttccttgggatggagtagtttcgaaacacactttctgtagaatctgcaagtggatatttggacctgtctgaggaatttgttggtaacgggataatttcagctaactaaacagaagcagtctctgaattttctttgtgatgtttgcattcaaatcccagaattgcaccttccttggaaagttcaggtttgaaaccctcattttgcaggatctacaagtggatatttggaccactctgtggccttcgttcgaaacgggtatatcttcacataacgtctagacagaagcattctcagaaacttttctgtgatgactgcattcaactcacagagttgaacactccttttgagagcgcagttttgaaactctctttctgtggaatctgcaaggggacatgtagacctctttgaaggtttcgttggaaacagaatcatcttcacaaaaaaattacacggaagcattctcaggaaccccttggtgctgattgtattcaacttccagagttgaactttccttcggaaagagcagctatgaaacactctttttctagaatctgcaagtggatatttggagggctttgaggtttgtggtggaaaaggaaatatcttcacataaatactagatggaagcattctcagaaactactttctgatgattgcattcacctcacagagttgaacattcctatttagagagcagtttggaaacactcttgttggagaatctgcaagtggagatttggagcgctttgaggcttatggtactaaagggaatagcttcatataaaaactagacagaagcattctcagaaaatactttgtgatgattgagtttaactcacagagctgaacattcctttggatggagcaggtttgaaacacactttttgtagaatctgcaagtggatatttggacctctactgaggatttcgttggaaacgggataactgcacctaactaaacagaaacattctcagaaacttctttgtgatatttgcattcaaatcccagagttgaaacttcctttgataggtcaggtttgaaacactctttctgtacgatctgcaagtggatatttggaccactctgtggccttcgttggaaacgggtacatcttcacataacatctagacagaagccttctcagaaacttctctgtgatgattgcattcaactcacagagttgaaccctcctatagatatagcagttctgaatctctctttttgtggaatctgcaagtggatatgtggacctctttgaagatgtctttggaaacgggaatatcttcacataaaaattaaacagaagcattctcagaaacttctctctcatgtttgcgttcacctcacagagtttcacattgcttttcatagagcagttctgaaacatgcttttcggactgtctgcaagtggacatttggagagctttcaggcctgtgttggaaaatgaattatcgtcacatagacactagagagaagcattgtcaggaacttgtttgtgatggttgcattcaactcacagtgttgaaggttccttttcaaccagcagtttccaagcacgccttctgtggaatctgcaagtggatatttggacctctttgaagatatcgttggaaacgggataatcttcacagaaaagctaaacagaagcattctcagaaactcctttgtgatgtttgcattcaactcacagagttgaacattccttttgagagacaagctttgaaacactctttctctagaatctgcaagtggatatttggagggctttgaggcctgtgctggaaagggaattctcttccagtaaaaactagatagaagcattctcagaaactactttgtgatgattgcattcaagtcacagagttgaatattccctttgacagagcactttggaaactctcgctgtgtagaatctgcaagtggagatatggaccgctttgaggcctatggtagtaaaggaaatagcttcatagaaaaactagacagtagcattctcagaaaactgtttgtgacgactgagtttaactcacaaggctgaacattcctttggatggagcagtttcgaaacacactctttgtagaatctgcaagtggatatatgggcctctctgaggatttcattggaaaagggataaaccgcacagaactaaacagaagcattctcagaaccttcttcgtgatgtttgcattcaactcacagtgttgaaccttttttgatagttcaggtttgaaacactctttttgtagaaactgcaagtggataattgcacttctttgaggcctatcctactaaaggaaataacttcttcatataaaatcaagacagaaggtttctcagaaaatcctctgggatgattgagttgaactcacagagctgtactttccttgggatggagtagtttcgaaacacactttctgtagaatctgcaagtggatatttggacctgtctgaggaatttgttggtaacgggataatttcagctaactaaacagaagcaatctcagaatcttctttgtgatgtttgcattcgaatcccagaattgaaccttcctttgaaagttcaggtttgaaactctctttttgcagtatctacaagtggatatttggaccactctgtggccttcgttcgaaacgggtatatcttcacataacatctagacagaagcattctcagaaacttttctgtgatgactgcattcaactcacagagttgaacactccttttgagagcgcagttttgaaactctctttctgtggaatctgcaaggggacatgtagacctctttgaaggttttgttggaaacagaatcatcttcacataaaaattacacagaagcattctcaggaaccccttggtgctgattgtattcaacttccagagttgaactttccttcggaaagagcagctatgaaacactctttttctagaatctgcaagtggatatttggagggctttgaggtttgtggtggaaaaggaaatatcttcacataaatactagatggaagcattctcagaaactactttgtgatgattgcattcacctcacagagttgaacattcctattgagagagcagtttggaaacactcttgttggagaatctgcaagtggagatttggagcgctttgaggcctatggtactaaagggaatagcttcatataaaaactaggcagaagcattctcagaaaatactttgtgatgattgagtgtaactcacagagctgaacattcctttggatggagcagttttgaaacacactttttgtagcatctgcaagtggatatttggacctctctgaggatttcgttggaaacgggataacgtcacctaactaaacagaagcattctcagaaacttctttgtgatgtttgcattcagatcccagtgttagaccttcctttgatagttcaggtttgaatcactctttttgtaggatctgcaagtggatatttggaccactctgtggccttcgttggaaacgggtacaacttcacataacatttagacagaagccttctcagaaacttctctttgatgattgcattcaactcacagagttgaaccctcctatagatatagcagttctgaatctctctttttgtggaatctgcaagtggatatgtggacctctttgaagatgtctttggaaacgggaatatcttcacataaaaattaaacagaagcattctcagaaacttctctctcatgtttgcgttcaactcacacagtttcacattgcttttcatagagcagttctgaaacatgcttttcggactgtctgcaagtggacatttggagagctttcaggcctgtgttggaaaatgaattatcgtcacatagacactagagagaagcattgtcaggaacttgtttgtgatggttgcattcaactcacagagttgaaggttccttttcaaccagcagtttccaagcacgccttctgtggaatctgcaagtggatatttggacctctttgaagatatcgttggaaacgggataatcttcacagaaaagctaaacagaagcattctcagaaactcctttgtgatgtttgcattcaactcacagagttgaacattccttttgagagacaagctttgaaacactctttctctagaatctgcaagtggatatttggagggctttgaggcctgtggtggaaagggaattctcttccagtaaaaactagatagaagcattctcagaaactactttgtgatgattgcattcaagtcacagagttgaatattccctttgacagagcactttggaaactctcgctgtgtagaatctgcaagtggagatatggaccgctttgaggcctatggtagtaaaggaaatagcttcatagaaaaactagacagtagcattctcagaaaactctttgtgacgactgagtttaactgacagggctgaagattcctttggatggagcattttcgaaacacactctttgtagaatctgcaagtggatatttgggcatctctgaggatttcgttggaaacgggataaactgcacagaactatacagaagcattctcagaaccttcttcgtgaggtttgcattcaactcacagtgttgaacctttctttgatagttcaggtttgaaacactctttttgtagaaactgcaagtggataattgcacttctttgaggcctatcgtcgtaaaggaaatatcttcatataaaaacaagacagaagctttctcagaaaaacctctgggatgattgagttgaactcacagagctgtactttccttgggatggagtagtttcgaaacacactttctgtagaatctgcaagtggatatttggacctgtctgaggaattcgttggaaacgggataacttcagctaactaaacagaagcagtctctgaattttctttgtgatgtttgcattcaaatcccagaattgcacattccttggaaagttcaggtttgaaaccctcattttgcaggatctacaagtggatatttggaccactctgtggccttcgttcgaaacgggtatatcttcacataacgtctagacagaagcattctcagaagcttctctgtgatgactgcattcaactcacggagttgaacactccttttgagagcgcagttttgaaactctctttctgtggcatctgcaaggggacatgtagacctctttgaagatttcgttggaaacggaatcatcttcacataaaaactatacagatgcattctcaggaactttttggtgatgtttgtattcaactcccagagttgaactttcctttggaaagagcagctatgaaacactctttttctagaatctgcaagtggacgattggagggctttgtggtttgtggtggaaaaggaaatatcttcacctaaatactagagagaagcattctcagaaactgctttgtgatgattgcattcacctcacagagttgaccattcctattgatagagcagtttggaaacactcttgttgtggaatgtgcaagtggagatttggagtgctttgaggcctatggtagtaaagggaatagcttcatagaaaaactagacagaagcattctcagaaaatactttgtgatgattgagtttaactcacagagctgaacattcctttggatggagcaggtttgaatcacactttttgtagaatctgcaagtggatatttggacctctctgaggatttcgttggaaacgggataactgcacctaactaaacggaagcattctcagaaacttctttgtgatatttgcattcaaatcccagagttgaaacttcctttgataggtcaggtttgaaacactctttctgtacgatctgcaagtggatatttggaccactctgtggccttcgttcgaaacgggtacatcttcacataacatctagacagaagccttctcagaaacttctctgtgatgattgcattcaactcacagagttgaaccctcctatggatatagcagttctgaatctctctttttgtggaatctgcaagtggatatgtggacctctttgaagatgtctttggaaacgggaatatcttcacataaaaattaaacagaagcattctcagaaacttctctctcatgtttgcgttcaactcacacagtttcacattgcttttcatagagcagttctgaaacatgcttttcggactgtctgcaagtggacatttggagagctttcaggcctgtgttggaaaatgaattatcgtcacatagacactagagagaagcattgtcaggaacttgtttgtgatggttgcattcaactcacagtgttgaaggttccttttcaaccagcagtttccaagcacgccttctgtggaatctgcaagtggatatttggacctctttgaagatatcgttggaaacgggataatcttcacagaaaagctaaacagaagcattctcagaaacttctttgtgatgtttgcattcaactcacagagttgaacattccttttgagagacaagctttgaaacactctttctctagaatctgcaagtggatatttggagggctttgaggcctgtggtggaaagggaattctcttccagtaaaaactagatagaagcattctcagaaactactttgtgatgattgcattcaagtcacagagttgaatattccctttgacagagcactttggaaactctcgctgtgtagaatctgcaagtggagatatggaccgctttgaggcctatggtagtaaaggaaatagcttcatagaaaaactagacagtagcattctcagaaaactgtttgtgacgactgagtttaactcacaaggctgaacattcctttggatggagcagtttcgaaacacactctttgtagaatctgcaagtggatatttgggcctctctgaggatttcattggaaaagggataaaccgcacagaactaaacagaagcattctcagaaccttcttcgtgaggtttgcattcaactcacagtgttgaaccttttttgatagttcaggtttgaaacactctttttgtagaaactgcaagtggataattgcacttctttgaggcctatcctactaaaggaaataacttcttcatataaaatcaagacagaagctttctcagaaaatcctctgggatgattgagttgaactcacagagctgtactttccttgggatggagtagtttcgaaacacactttctgtagaatctgcaagtggatttttggacctgtctgaggaatttgttggtaacgggataatttcagctaactaaacagaagcagtctctgaattttctttgtgatgtttgcattcaaatcccagaattgcacattccttggaaagttcaggtttgaaaccctcattttgcaggatctacaagtggatatttggaccactctgtggccttcgttcgaaacgggtatatcttcacataacgtctagacagaagcattctcagaaacttttctgtgatgactgcattcaactcacagagttgaagactccttttgagagcgcagttttgaaactctctttctgtggaatctgcaaggggacatgtagacctctttgaaggttttgttggaaacagaatcatcttcacataaaaattacacagaagcgttctcaggaactccttgatgttgtttgtattcaacttccagagttgaactttccttcggaaagagcagctatgaaacactctttttctagaatctgcaagtggatatttggagggctttgaggtttgtggtggaaaaggaaatatcttcacataaatactagatggaagcattctcagaaactaactttgtgatgattgcattcacctcacagagttgaacattcctattgagagagcagtttggaaacactcttgttggagaatctgaaagtggagatttggagcgctttgaggcctatggtactaaagggaatagcttcatataaaaactaggcagaaacattctcagaaaatactttttgatgattgagtttaactcacagagctgaacattcctttggatggagcaggtttgaatcacactttttgtagaatctgcaagtggatatttggacctctctgaggatttcgttggaaacgggataactgcacctaactaaacagaagcattctcagaaacttctttgtgatgtttgcattcaaatcccagagttgatccttcctttgataggtcaggtttgaaacactctttttttacgatctgcaagtggatatttggaccactctgtggccttcgttggaaacgggtacatcttcacattacatctagacagaagccttctcagaaacttctctgtgatgattgcattcaactcacagagttgaaccctcctatggatatagcagttctgaatctctctttttgtggaatctgcaagtggatatgtggacctctttgaagatgtctttggaaacgggaatatacttcacataaaaattaaacagaagcattctcagaaacttctctgtcatgtttgcattcacctcacagagtttcacattgcttttcatagagcagttctggaacatgcttttcggagtgtctgcaagtggacatttggagagccttctggcctgtgttggaaaacgaattatcgtcacataaaaactagagagaagcattgtcaggaacttgtttgtgatggttgcattcaactcacagagttgaaggttccttttcaaacagcagtttccaagcacgccttctgtggaatctgcaagtggatatttggacctctttgaagatatcgttggaaacgggataatcttcacagaaaagctaaacagaagcatgctcaggatctccttggtgatgtttgtattcaacttccagagttgaactttccttcggaaagaacagctatgaaacactctttttctagaatctgcaagtggacatttggagggctttgaggtttgtggtggaaaaagaaatatcttcacataaatagtagatagaagcattctcagaaactactttgtgatgattgcattcacctcacagagttgaacattccctttgacagagcactttggaaactctcgttgtgtagcgtctgcaagttgagatatggaccgctttgaggcctatggtagtaaaggaaatagcttcatataaaaactagacagtagcattctcagaaaactgtttgtgacgactgagtttaactcacaaggctgaacattcctttggatggagcagtttcgaaacacactctttgtagaatctgcaagtggatatttgggcctctctgaggatttcattggaaaagggataaaccgcacagaactaaacagaagcattctcagaaccttcttcgtgatgtttgcattcaactcacagtgttgaaccttttttgatagttcaggtttgaaacactctttgtgtagaaactgcaagtggataattgcacttctttgaggcctatcctactaaaggaaataacttcttcatataaaatcaagacagaagctttctcagaaaatcctctgggatgattgagtggaactcacagagctgtactttccttgggatggagtagtttcgaaacacactttctgtaaaatctgcaagtggatatttggacctgtctgaggaatttgttggtaacgggataatttcagctaactaaacagaagcagtctctgaattttctttgtgatgtttgcattcaaatcccagaattgcacattccttggaaagttcaggtttgaaaccctcattttgcaggatctacaagtggatatttggaccactctgtggccttcgatcgaaacgggtatatcttcacataacgtctagacagaagcattctcagaaacttttctgtgatgactgcattcaactcacagagttgaacactccttttgagagcgcagttttgaaactctctttctgtggaatctgcaaggggacatgtagacctctttgaaggtttcgttggaaacagaatcatcttcacaaaaaaattacacggaagcattctcaggaaccccttggtgctgattgtattcaacttccagagttgaactttccttcggaaagagcagctatgaaacactctttttctagaatctgcaagtggatatttggagggctttgaggtttgtggtggaaaaggaaatatcttcacataaatactagatggaagcattctcagaaactattttgtgatgattgcattcacctcacagagttgaacattcctattgagagagcagtttggaaacactcttgttggagaatctgcaagtggagatttggagcgctttgaggccaatggtactaaagggaatagcttcatataaaaactaggcagaagcattctcagaaaatactttgtgatgattgagtttaactcacagagctgaacattcctttggatggagcaggtttgaaacacactttttgtagaatctgcaagtggatatttggacctctctgaggatttcgttggaaacgggataactgcacctaactaaacagaagcattctcagaaacttctttgtgatgtttgcattcaactcccagagttgaaccttcctttgataggtcaggtttgaaacactctttctgtacgttctgcaagtggatatttggaccactctgtggccttcgttcgaatcgggtacatcttcacataacatctagatagaagccttctcagaaacttctctgtgatgattgcattcaactcacagagttgaaccctcctatggatagagcagttttgaatctctcattttgtggaatctgcaagtggatatgtggacctctttgaagatgtctttggaaacgggaatatcttcacataaaacctaaagagaagcattctcagaaacttctctctcatgtttgcgttcaactcacacagtttcacattgcttttcatagagcagttctgaaacatgcttttcggactgtctgcaagtggacatttggagagctttctggcctgtgttggaaaatgaattatcgtcacatagacactagagagaagcattgtcaggaacttgattgtgatggttgcattcaactcacagagttaaaggttccttttcaaccagcagtttccaagcacgccttctgtggaatctgcaagtggatatttggacctctttgaagatatcattggaaacgggataatcttcacagaaaagctaaacagaagcattctcagaaactcctttgtgatgtttgcattcaactcacagagttgaacattccttttgagagacaagctttgaaacactctttctctagaatctgcaagtggatatttggagggctttgaggcctgtggtggaaagggaattctcttccagtaaaaactagatagaagcattctcagaaactactttgtgatgattgcattcaagtcacagagttgaatattccctttgacagagcactttggaaactctcgctgtgtagaatctgcaagtggagatatggaccgctttgaggcctatggtagtaaaggaaatagcttcatagaaaaactagacagtagcattctcagaaaactgtttgtgacgactgagtttaactcacaaggctgaacattcctttggatggagcagttttgaaacacactctttgtagaatctgcaagtggatatttggacctctctgaggatttcattggaaaagggataaaccgcacagaactaaacagaagcattctcagaaccttcttcgtgatgtttgcattcaactcacagtgttgaaccttttttgatagttcaggtttgaaacactctttgtgtagaaactgcaagtggataattgcacttctttgaggcctatcctactaaaggaaataacttcttcatataaaatcaagacagaagctttctcagaaaatcctctgggatgattgagttgaactcacagagctgtactttccttgggatggagtagtttcgaaacacactttctgtagaatctgcaagtggatatttggacctgtctgaggaatttgttggtaacgggataatttcagctaactaaacagaagcaatctccgaatcttctttgtgatgtttgcattcgaatcccagaattgaaccttcctttgaaagttcaggtttgaaactctctttttgcagtatctacaagtggatatttggaccactctgtggccttcgttcgaaacgggtatatcttcacataacatctagacagaagcattctcagaaacttttctgtgatgactgcattcaactcacggagttgaagactccttttgagagcgcagttttgaaactctctttgtgtggaatctgcaaggggacatgtagacctctttgaaggttttgttggaaacagaatcatcttcacataaaaattacacagaagcattctcaggaaccccttggtgctgattgtattcaacttccagagttgaactttccttcggagagagcagctatgaaacactctttttctagaatctgcaagtggatatttggagggctttgaggtttgtggtggaaaaggaaatatcttcacataaatactagatggaagcattctcagaaactactttgtgatgattgcattcacctcacagagttgaacattcctattgagagagcagtttggaaacactcttgttggaaaatctgcaagtggagatttggagcactttgaggcctatggtactaaagggaatagcttcatataaaaactaggcagaagcattctcagaaaattctttttgacgattgagtttaactcacagagctgaacattcctttggatggagctgttttgaaacacaccttttgtagaatctgcaagtggatatttggacctctctgaggatttcgttggaaacgggataacttcacctaactaaacagaagcattctcagaaacttctttgagaggtttgcattcaaatcccagagttgatccttcctttgataggtcaggtttgaaacactctttctgtacgatctgcaagtggatatttggaccactctgtggccttcgttggaaacgggtacatcttcacattacatctagacagaagccttctcagaaacttctctatgatgattgctttcaactcacagagttgaaccctcctatggatatagcagttctgaatctctctttttgtggaatctgcaagtggatatgtggacctctttgaagatgtctttggaaacgggaatatcttcacataaaaattaaacagaagcattctcagaaacttctctctgatgtttgcgttcaactcacacagtttcacattgcttttcatagagcagttctgaaacatgcttttcggagtgtctgcaagtgaacatttggagagctttcaggcctgtgttgggaaatgtattatcgtcacataaacactagagagaagcattgtcaggaacttgtttgtgatggttgcattcaactcacagagttaaaggttccttttcaaccagcagtttccaagcacgccttctgtggaatctgcaagtggatatttggacctctttgaagatatcgttggaaacgggataatcttcacagaaaagctaaacagaagcattctcagaaacttctttgtgatgtttgcattcaactcacagagttgaacattccttttgagagacaagctttgaaacactctttctctagaatctgcaagtggatatttggagggctttgaggcctgtggtggaaagggaattatcttccagtaaaaactagatagaagcattctcagaaactactttgtgatgattgcattcaagtcacagagttgaatattccctttgacagagcactttggaaactctcgttgtgtagaatctgcaagtggagatatggaccgctttgaggcctatggtagtaaaggaagttgcttcatagaaaaactagacagtagcattctcagaaaactgtttgtgacgactgagtttaactcacaaggctgaacattcctttggatggagcagtttcgaaacacactctttgtagaatctgcaagtggatatttgggcctctctgaggatttcattggaaaagggataaaccgcacagaactaaacagaagcattctcagaaccttcttcgtgaggtttgcattcaactcacagtgttgaacctttctttgatagttcaggtttgaaacactctttttgtagaaactgcaagtggataattgcacttctttgaagcctatcgtagtaaaggaaatatcttcatataaaaacaagacagaagctttctcagaaaatcctctgggatgattgagttgaactcacagagctgtactttccttgggatggagcagtttcgaaacacactttctgtagaatctgcaagtggatatttggacctgtctgaggaattcgttggaaacgggataatttcagctaactaaacagaagcagtctctgaattttctttgtgatgtttgcattcaaatcccagaattgcaccttccttggaaagttcaggtttgaaaccctcattttgcaggatctacaagtggatatttggaccactctgtggccttcgttcgaaacgggtatatcttcacataacatctagacagaagcattctcagaaacttttctgtgatgactgcattcaactcacagagttgaacactccttttgagagcgcagttttgaaactctctttctgtggaatctgcaaggggacatgtagacctctttgaaggtttcgttggaaacagaatcatcttcacataaaaattacacggaagcatgctcaggatctccttggtgatgtttgtattcaacttccagagttgaactttctttcggaaaaaacagctatgaaacactctttttctagaatctgcaagtggatatttggagggctttgaggtttgtggtggaaaaagaaatatcttcacataaatagtagatagaagcattctcagaaactactttgtgatgattgcattcacctcacagagttgaacattcctattgagagagcagtttggaaacactctttttggagaatctgcaagtggagatttggagcgctttgaggcctatggtactaaagggaatagcttcatataaaaactaggcagaagcattctcagaaaatactttgtgatgattgagtttaactcacagagctgaacattcctttggatggagcaggtttgaatcacactttttgtagaatctgcaagtggatatttggacctctctgaggatttcgttggaaacgggataactgcacctaactaaacagaagcattctcagaaacttctttgtgatatttacattcaaatcccagagttgaaacttcctttgataggtcaggtttgaaacactctttctgtacgatctgcaagtggatatttggaccactctgtggcgttcgttcgaaacgggtacatcttcacataacatctagacagaagccttctcagaaacttctctgtgatgattgcattcaactcacagagttgaaccctcctatagatatagcagttctgaatctctctttttgtggaatctgcaagtggatatgtggacctctttgaagatgtctttggaaacgggaatatcttcacataaaaattaaacagaagcattctcagaaacttctctgtgatgtttgtgttcaactcacacagtttcacattgcttttcatagagcagttctgaaacatgcttttcggactgtctgcaagtggacatttggagagctttcaggcctgtgttggaaaatgaattatcgtcacatagacactagagagaagcattgtcaggaacttgtttgtgatggttgcattcaactcacagagttgaaggttccttttcaaccagcagtttccaagcacgccttctgtggaatctgcaagtggatatttggacctctttgaagatatcattggaaacgggataatcttcacagaaaagctaaacagaagcattctcagaaacttctttgtgatgtttgcattcaactcacagagttgaactttcctgttgagagagaagctgtgaaacattctttctctagactctgcaagtggatatttggagggctttgaggcctgtggtggaaagggaattatcttcccgtaaaaactagatagaagcattctcagaaactacttggtgatgattgcattcaagtcacagagttgaacattccctttgacagaacactttggaaactctggttgtgtagaatctgcaagtggagatatggaccgctttgaggcctatggtagtaaaggaaatggcttcatataaaaactagacagtagcattctcagaaaactctttgtgacgactgagtttaactcacagggctgaacattcctttggatggagcagtttcgaaacacactacttgtagaatctgccagtggatatttgggcctctctgaggatttcgctggaaacgggataaaccgcacagaaataaacagaagcattctcagaaccttcttcgtgaggtttgcattcaactcacagtgttgaacctttctttgatagttcaggtttgaaacactctttttgtagaaactgcaagtggataattgcacttctttgaggcctatcgtagtaaaggaaatatcttcatataaaaacaagacagaaggtttctcagaaaatcctctgggatgattgagttgaactcacagagctgtactttccttgggatggagtagtttcgaaacacactttctgtagaatctgcaagtggatatttggacctgtctgaggaatttgttggtaacgggataatttcagctaactaaacagaagcagtctctgaattttctttgtgatgtttgcattcaaatcccagaattgcaccttccttggaaagttcaggtttgaaaccctcattttgcaggatctacaagtggatatttggaccactctgtggccttcgttcgaaacgggtatatcttcacataacgtctagacagaagcattctcagaaacttttctgtgatgactgcattcaactcacagagttgaacactccttttgagagcgcagttttgaaactctctttctgtggaatctgcaaggggacatgtagacctctttgaaggtttcgttggaaacagaatcatcttcacaaaaaaattacacggaagcgttctcaggaactccttgatgttgtttgtattcaacttccagagttgaactttccttcggaaagagcagctatgaaacactctttttctagaatctgcaagtggacatgaggagggctttgaggtctgtggtggaaaaggtaatatcttcacataaatattagatagaagcattctcagaaactactttgtgatgattgcattcacctcacagagttgaacattcctattgatagagcagtttggaaactttcttgttgtagaatttgcaaggggagatttggcgcgctttgaggccaatggtagtaaagggaatagcttcatataaaaactagacagannnnnnnnnnnnnnnnnnnnnnnnnnnnnnnnnnnnnnnnnnnnnnnnnnnnnnnnnnnnnnnnnnnnnnnnnnnnnnnnnnnnnnnnnnnnnnnnnnnncgtctagacagaagcattctcagaaacttttctgtgatgactgcattcaactcacagagttgaacactccttttgagagcgcagttttgaaactctctttctgtggaatctgcaaggggacatgtagacctctttgaaggtttcgttggaaacagaatcatcttcacaaaaaaattacacggaagcattctcaggaaccccttggtgctgattgtattcaacttccagagttgaactttccttcggagagagcagctatgaaacactctttttcgagaatctgcaagtggatatttggagggctttgaggtttgtggtggaaaaggaaatatcttcacataaatactagatggaagcattctcagaaactactttgtgatgattgcattcacctcacagagttgaacattcctattgagagagcagtttggaaacactcttgttggagaatctgcaagtggagatttggagcgctttgaggcctatggtactaaagggaatagcttcatataaaaactaggcagaagcattctcagaaaatactttgtgatgattgagttgaactcacagagctgaacattcctttggatggagcaggtttgaaacacactttttgtagaatctgcaagtggatatttggacctctctgaggatttcgttggaaacgggataactgcacctaactaaacagaagcattctcagaaacttctttgtgatatttgcattcaaatcccagagttgaaacttcctttgataggtcaggtttgaaacactctttctgtacgatctgcaagtggatatttggaccactctgtggccttcgttcgaaacgggtacatcttcacataacatctagacagaagccttctcagaaacttctctgtgatgattgcattcaactcacagagttgaaccctcctatagatatagcagttctgaatctctctttttgtggaatctgcaagtggatatgtggacctctttgaagatgtctttggaaacgggaatatcttcacataaaaattaaacagaagcattctcagaaacttctctctcatgtttgcgttcacctcacacagtttcacattgcttttcatagagcagttctgaaacatgcttttcggactgtctgcaagtggacatttggagagctttcaggcctgtgttggaaaatgaattatcgtcacatagacactagagagaagcattgtcaggaacttgtttgtgatggttgcattcaactcacagagttgaaggttccttttcaaccagcagtttccaagcacgccttctgtggaatctgcaagtggatatttggacctctttgaagatatcgttggaaacgggataatcttcacagaaaagctaaacagaagcattctcagaaactcctttgtgatgtttgcattcaactcacagagttgaacattccttttgagagacaagctttgaaacactctttctctagaatctgcaagtggatatttggagggctttgaggcctgtggtggaaagggaattctcttccagtaaaaactagatagaagcattctcagaaactaatttgtgatgattgcattcaagtcacagagttgaatattccctttgacagagcactttggaaactctcgctgtgtagaatctgcaagtggagatatggaccgctttgaggcctatggtagtaaaggaaatagcttcatagaaaaactagacagtagcattctcagaaaactgtttgtgacgactgagtttaactcacaaggctgaacattcctttggatggagcagtttcgaaacacactctttgtagaatctgcaagtggatatttgggcctctctgaggatttcattggaaaagggataaaccgcacagaactaaacagaagcattctcagaaccttcttcgtgaggtttgcattcaactcacagtgttgaaccttttttgatagttcaggtttgaaacactctttttgtagaaactgcaagtggataattgcacttctttgaggcctatcctactaaaggaaataacttcttcatataaaatcaagacagaagctttctcagaaaatcctctgggatgattgagtggaactcacagagctgtactttccttgggatggagtagtttcgaaacacactttctgtaaaatctgcaagtggatatttggacctgtctgaggaatttgttggtaacgggataatttcagctaactaaacagaagcagtctctgaattttctttgtgatgtttgcattcaaatcccagaattgcacattccttggaaagttcaggtttgaaaccctcattttgcaggatctacaagtggatatttggaccactctgtggccttcgatcgaaacgggtatatcttcacataacgtctagacagaagcattctcagaaacttttctgtgatgactgcattcaactcacagagttgaacactccttttgagagcgcagttttgaaactctctttctgtggaatctgcaaggggacatgtagacctctttgaaggtttcgttggaaacagaatcatcttcacaaaaaaattacacggaagcattctcaggaaccccttggtgctgattgtattcaacttccagagttgaactttccttcggagagagcagctatgaaacactctttttctagaatctgcaagtggatatttggagggctttgaggcttgtggtggaaaaggaaatatcttcacataaatactagatggaagcattctcagaaactactttgtgatgattgcattcacctcacagagttgaacattcctattgagagagcagtttggaaacactcttgttggagaatctgcaagtggagatttggagcgctttgaggcctatggtactaaagggaatagcttcatataaaaactaggcagaagcattctcagaaaatactttgtgatgattgagtttaactcacagagctgaacattcctttggatggagcaggtttgaaacacactttttgtagaatctgcaagtggatatttggacctctctgaggatttcgttggaaacgggataactgcacctaactaaacagaagcattctcagaaacttctttgtgatgtttgcattcaaatcccagagttgaaccttcctttgataggtcaggtttgaaacactctttctgtacgatctgcaagtggatatttggaccactctgtggccttcgttcgaaacgggtacatcttcacataacatctagacagaagccttctcagaaacttctctgtgatgattgcattcaactcacagagttgaaccctcctatggatagagcagtgttgaaactctctttttgtggaatctgcaagtggatatgtggacctctccgaagatgtctttggaaacgggactatcttcacataaaaactaaacagaagcattctcagaaacttctctgtgatgtttgtgttcaactcccagagtttcacattgcttttcatagagtagttctgaaacatgcttttcgtagtgtctgcaagtggacatttggagcgctttcaggcctgtggtggaaaacgaattatggtcacataaaaactggagagaagcattgtcagaaacttctttgtgatgattgccttcaactcacagagttgaaggttccttttcaaacagcagtttccaaacactctttctgtggaatctgcaagtggatgtttggacctctttgaagatttcgttggaaacgggagaatcttcacagaaaagctaaacagaagcattctcagaaacttctttgtgatgcttgcattcaactcacagagttgaactttcctttcgagagagaagctttgaaacactctttttccagaatctgcaagtggacatttggagggctttgaggctgtggtggaaaggattatcttcccgtaaagctagatagaagcattctcagaaactactttgtgatgattgcattcaagtcacagagttgaatattccctttgacagagcactttggaaactctcgttgtgtagaatctgcaagtggagatatggaccgctttgaggcctatggtagtaaaggaagttgcttcatagaaaaactagacagtagcattctcagaaaactgtttgtgacgactgagtttaactcacaaggctgaacattcctttggatggagcagtttcgaaacacactctttgtagaatctgcaagtggatatttgggcctctctgaggatttcattggaaaagggataaaccgcacagaattaaacagaagcattctcagaaccttcttcgtgatgtttgcattcaactcacagtgttgaaccttttttgatagttcaggtttgaaacactctttttgtagaaactgcaagtggataattgcacttctttgaggcctatcctactaaaggaaataccttcttcatataaaatcaagacagaagctttctcagaaaatcctgtgggatgattgagttgaactcacagagctgtactttccttgggatggagttgtttcgaaacacactttcagtagaatctgcaagtggatatttggacctgtctgaggaatttgttggtaacgggataatttcagctaactaaacagaagcactctctgaattttctttgtgatgtttgcattcaaatcccagaattgcaccttccttggaaagttcaggtttgaaaccctcattttgcaggatctacaagtggatatttggaccactctgtggccttcgttcgaaacgggtatatcttcacataacgtctagacagaagcattctcagaaacttttctgtgatgactgcattcaactcacagagttgaacactccttttgagagcgcagttttgaaactctctttctgtggaatctgcaaggggacatgtagacctctttgaaggtttcgttggaaacagaatcatcttcacaaaaaaattacacggaagcattctcaggaaccccttggtgctgattgtattcaacttccagagttgaactttccttcggagagagcagctacgaatcactcattttctagaatctgcaagtggatatttggagggctttgaggtttgtggtggaaaaggaaatatcttcacataaacactagatgggagcattctcagaaactactttctgatgattgcattcacctcacagagttgaacattcctatttagagagcagtttggaaacactcttgttggagaatctgcaagtggagatttggagcgctttgaggcctatggtactaaagggaatagcttcatataaaaactagacagaaacattctcagaaaatactttttgatgattgagtttaactcacagagctgaacattcctttggatggagcaggtttgaatcacactttttgtagaatctgcaagtggatatttggacctctctgaggatttcgttggaaacgggataactgcacctaactaaacagaagcattctcagaaacttctttgtgatgtttgcattcaaatcccagagttgatccttcctttgataggtcaggtttgaaacactctttttttacgatctgcaagtggatatttggaccactctgtggccttcgttggaaacgggtacatcttcacattacatctagacagaagccttctcagaaacttctctgtgatgattgcattcaactcacagagttgaaccctcctatggatatagcagttctgaatctctctttttgtggaatctgcaagtggatatgtggacctctttgaagatgtctttggaaacgggaatatcttcacataaaaattaaacagaagcattctcagaaacttctctctcatgtttgcgttcaactcacacagtttcacattgcttttcatagagcagttctgaaacatgcttttcggactgtctgcaagtggacatttggagagctttcaggcctgtgttggaaaatgaattatcgtcacatagacactagagagaagcattgtcaggaacttgtttgtgatggttgcattcaactcacagagttgaaggttccttttcaaccagcaatttccaagcacgccttctgtggaatctgcaagtggatatttggacctctttgaagatatcgttggaaacgggataatcttcacagaaaagctaaacagaagcattctcagaaactcctttgtgatgtttgcattcaactcacagagttgaacattccttttgagagacaagctttgaaacactctttctctagaatctgcaagtggatatttggagggctttgaggcctgtggtggaaagggaattctcttccagtaaaaactagatagaagcattctcagaaactactttgtgatgattgcattcaagtcacagagttgaatattccctttgacagagcactttggaaactctcgttgtgtagaatctgcaagtggagatatggaccgctttgaggcctatggtagtaaaggaaatagcttcatagaaaaactagacagtagcattctcagaaaactgtttgtgacgactgagtttaactgacagggctgaagattcctttggatggagcattttcgaaacacactctttgtagaatctgcaagtggatatttgggcatctctgaggatttcgttggaaacgggataaactgcaaagaactatacagaagcattctcagaaccttcttcgtgaggtttgcattcaactcacagtgttgaacctttctttgatagttcaggtttgaaacactctttttgtagaaactgcaagtggataattgcacttctttgaggcctatcgtagtaaaggaaatatcttcatataaaaacaagacagaagctttctcagaaaatcctctgggatgattgagttgaactcacagagctgtactttccttgggatggagtagtttcgaaacacactttctgtagaatctgcaagtggatatttggacctgtctgaggaattcgttggaaacgggataatttcagctaactaaacagaagcagtctctgaattttctttgtgatgtttgcattcaaatcccagaattgcaccttccttggaaagttcaggtttgaaaccctctttttgcaggatctacaagtggatatttggaccactctgtggccttcgttcgaaacgggtatatcttcacataacgtctagaccgaagcattctcagaaacttttctgtgatgactgcattcaactcacagagttgaacactccttttgagagcgcagttttgaaactctctttctgtggaatctgcaaggggacatgtagacctctttgaaggtttcgttggaaacagaatcatcttcacaaaaaaattacacggaagcattctcaggaaccccttggtgctgattgtattcaacttccagagttgaactttccttcggagagagcagctatgaaacactctttttcgagaatctgcaagtggatatttggagggctttgaggtttgtggtggaaaaggaaatatcttcacataaatactagatggaagcattctcagaaactactttgtgatgattgcattcacctcacagagttgaacattcctattgagagagcagtttggaaacactcttgttggagaatctgcaagtggagattggagcgctttgaggctatggtactaaagggaatagcttcatataaaactaggcagaagcattctcagaaaatactttgtgatgattgagtttaactgacagagctgaacattcctttggatggagcaggtttgaaacacactttttgtagatctgcagtggatatttggacctctctgaggatttcgttggaaacgggataactgcacctaactaaacagaagcattctcagaaacttctttgtgatgtttgcattcagatcccagagttagaccttcctttgatagttcaggtttgaatcactctttttgtaggatctgcaagtggatatttggaccactctgtggccttcgttggaaacgggtacaacttcacataacatctagacagaagccttctcagaaacttctctgtggtgattgcgttcaactcacagagttgaacgctcctatggataaagcagttttgaatctctctttttgtggaatctgcaagtggatatgtgaacctctttgaagatgtctttggaaacgggaatatcttcacataaaaactaaacagaagcattctcagaaacttctctgtgatgtttgcgttcaactcacagagtttcacattgcttttcatagagcagttctgaaacatgcttttcggaatatctgcaagtggacatttggagagctttcaggcctgtggtggaaaatgaattatcgtcacataaaaactagagagtagcattgtcagaaacttgtttgtgatgattgcattcaactcacagagttgaaggttccctttcaaacagcagtttccaaacacactttctgtggaatctgcaattggatagttggacctctttgaagatgtctttggaaacgggataatcttcacagaaaagctaaacagaaacattgtcagaaacttctttgtgatgtttgcattctactcacagagttgaactttccttttgagagagaagctttgaaacactctttctctagaatctgcaagtggatatttggagggctttgaggcctgtggtggaaaaggaattaacttcccgtaaaaactagatagaagcattctcagaaactacttggtgatgattgcattcaagtcacagagttgaacattccctttgacagaacactttggaaactctggttgtgtagaatctgcaagtggagatatggaccgctttgaggcctatggtagtaaaggaaatagcttcatataaaaactagacagtagcattctcagaaaactctttgtgacgactgagtttaactcacagggctgaacattcctttggatggagcagtttcgaaacacactacttgtagaatctgccagtggatatttgggcctctctgaggatttcgctggaaacgggataaaccgcacagaaataaacagaagcattctcagaacattcttcgtgatgtttgcgttcaactcacagcgttgaacctttccttgatacttcgggttttgaaacactctttttgtagaaactgcaagtggataattgcacttctttgaggcctatcctagtaaaggaaataacttcatataaaaacaagacagaagctttctcagaaaatcctctgggatgattgagttgaactcacagagctgtactttccttgggatggagtagtttcgaaacacactttctgtagaatctgcaagtggatatttggacctgtctgaggaatacgttggaaacgggataatttcagctaactaaacagaagcagtctcagaatcttctttgtgatgtttgcattcgaatcccagagttgaaccttcgtttgaaagttcaggtttgaaaccctctttttgcaggatctacaagtggatatttggaccactctgtggccttcgttcgaaacgggtatatcttcacataacatctagacagaagcattctcagaaacttttctgtgatgactgcattcaactcacagagttgaagactccttttgagagcgcagttttgaaactctctttctgtggaatctgcaaggggacatgtagacctctttgaaggttttgttggaaacagaatcatcttcacataaaaattacacagaagcgttctcaggaactccttgatgttgtttgtattcaacttccagagttgaactttccttcggaaagagcagctatgaaacactctttttctagaatctgcaagtggacatgaggagggctttgaggtctgtggtggaaaaggtaatatcttcacataaatattagatagaagcattctcagaaactactttgtgatgattgcattcacctcacagagttgaacattcctattgatagagcagtttggaaactttcttgttgtagaatttgcaaggggagatttggcgcgctttgaggccaatggtagtaaagggaatagcttcatataaaaactagacagaagcattctcagaaaatactttgtgatgattgagtttaactgacagagctgaacattcctttggatggagcaggtttgaaacacactttttgtagaatctgcaagtggatatttggacctctctgaggatttcgttggaaacgggataactgcacctaactaaacagaagcattctcagaaacttctttgtgatgtttgcattcagatcccagtgttagaccttcctttgatagttcaggtttgaatcactctttttgtaggatctgcaagtggatatttggaccactctgtggccttcgttggaaacgggtacaacttcacataacatttagacagaagccttctcagaaacttctctgttgtgattgcgttcaactcacagagttgaacgctcctatggataaagcagttttgaatctctctttttggggaatctgcaagtggatatgtgaacctctttgaagatgtctttggaaacgggaatatcttcacataaaaactaaacagaagcattctcagaaacttctctgtgatgtttgcgttcaactcacagagtttcacattgcttttcatagagcagttctgaaacatgcttttccggaatatctgcagtggacatttggagagctttcaggcctgtggtggaaaacgaattatcgtcacataaaaactggagagaagcattgtcagaaacttgtttgtgatnnnnnnnnnnnnnnnnnnnnnnnnnnnnnnnnnnnnnnnnnnnnnnnnnnnnnnnnnnnnnnnnnnnnnnnnnnnnnnnnnnnnnnnnnnnnnnnnnnnnnnnnnnnnnnnnnnnnnnnnnnnnnnnnnnnnnnnnnnnnnnnnnnnnnnnnnnnnnnnnnnnnnnnnnnnnnnnnnnnnnnnnnnnnnnnnnnnnnnnnnnnnnnnnnnnnnnnnnnnnnnnnnnnnnnnnnnnnnnnnnnnnnnnnnnnnnnnnnnnnnnnnnnnnnnnnnnnnnnnnnnnnnnnnnnnnnnnnnnnnnnnnnnnnnnnnnnnnnnnnnnnnnnnnnnnnnnnnnnnctgtactttccttgggatggagtagtttcgaaacacactttctgtagaatctgcaagtggatatttggacctgtctgaggaattcgttggaaacgggataacttcagctaactaaacagaagcaatctccgaatcttctttgtgatgtttgcattcgaatcccagaattgaaccttcctttgaaagttcaggtttgaaactctctttttgcagtatctacaagtggatatttggaccactctgtggccttcgttcgaaacgggtatatcttcacataacatctagacagaagcattctcagaaacttttctgtgatgactgcattcaactcacggagttgaagactccttttgagagcgcagttttgaaactctctttgtgtggaatctgcaaggggacatgtagacctctttgaaggttttgttggaaacagaatcatcttcacataaaaattacacagaagcatgctcaggatctccttggtgatgtttgtattcaacttccagagttgaactttctttcggaaaaaacagctatgaaacactctttttctagaatctgcaagtggatatttggagggctttgaggtttgtggtggaaaaagaaatatcttcacataaatagtagatagaagcattctcagaaactactttgtgatgattgcattcacctcacagagttgaacattccctttgacagagcactttggaaactctcgttgtgtagcgtctgcaagttgagatatggaccgctttgaggcctatggtagtaaaggaaatagcttcatataaaaactagacagtagcattctcagaaaactctttgtgacgactgagtttaactcacagggctaaacattgccttggatggagcagtttcgaaacaaactatttgtagaatctgcaagtggatatttggacctctctgaggatttcgttggaaacgggaaaactgcacctaactaaacagaagcattctcagaaacttcttcttgatgtttgcattcaactcacagtgttgaacctttctttgatagttcaggtttcaaacactctttttgtagaaactgcaagtggataattgcacttctttgaggcctatcctagtaaaggaaataacttcatataaaaacaagacagaagctttctcagaaaatcctctgggatgattgagttgaactcacagagctgtactttccttgggatggagtagtttcgaaacacactttctgtagaatctgcaatgggatatttggacctgtctgaggaattcgatgtaaatgggataatttcagctaactacacagaaggaatctcagaatcttctttgtgatgtttgcattgaaatcccagagttgaactttcctttgaaagttcaggtttcaatccctgtttttgcaggatctgcaagtggatatttggaccactctgtgtccttcattcgaaacgggtacatcgtcacataaaatctagacagaagccttctcagaaacttctctgtgatgattgcaatcaactcacagagttgaaccctcctatggataaagcagttttgaatctctctttttgtggaatctgcaagtggatatatggacctctttgaagatgcctttggaaacgggaatatcttcacataaaaactaaacagaagcaatctcagaaacttctctgtgatgtttgtgttcaactcacagagtttcacattgcttttcatagagcagttctgaaacatgcttttcgtagtgtctgcaagtggacatttggagagctttcaggccagtggtggaaaacgaattatcatcacataaaaactagagagaagcattgtcggaaacttgtttgtgatgattgcattcaactcacagagttgaaggttccttttcaaacatcagtttccaaacactctttctgtggaatctggaagaggatatttggacctctttgaagatttcgttggaaacgggataatcttcacagaaaagctaaacagaagcattctcagaaccttcttcgtgatgtttgcattcaactcacagtgttgaacctttctttgatagttcaggtttgaaacactctttttgtagaaactgcaggtggataattgtacttctttgaggcctatcatagtaaaggaaataacttcatataaaaacaagacagaagctttctcagaaaattctctgggatgactgagttgaactcacagagctgtactttccttgggaaggagtagtttctcaacacactttctgtagaatctgcaagtggatatttggacctctctgctgaattcgttggaaaccagataatttcagctaactaaacagaagcaatctcagaatcttctttgtgatgtttgcattcaaatcccagagttgaaccttcctttgaaagttcaggtttgaaaccctctttttgcaggatctaccaatttattttgggaccactctgtggtcttcgttcgaaacgggtatatcttcacataacatctagacagaagcattctcagaaacttttctgtgatgactgcattccactcacagagttgtacactccttttgagagcgcagttttgaaactctctttctgtggaatctgcaaggggacatgtagacctctttgaaggtttcgtttggaaacggaatcatcttcacataaaaattacacagaagcattctcaggaactccttggtgatgtttgtattcaacttccacagttgaactttacttcggaaagagcagctatgaaacactctttttctagaatctgcaagtggacatttggagggctttgaggtttgtggtggaaaaggaaatatcttcacataaatactagatggaagcattctcagaaactactttgtgatgattgcattcacctcacagagttgaacattcctattgagagagcagtttggaaacactcttgttggaaaatctgcaagtggagatttggagcactttgaggcctatggtactaaagggaatagcttcatataaaaactaggcagaagcattctcagaaaatactttgtgatgattgagtttaactcacagagctgaacattcctttggatggagcaggtttgaaacacactttttgtagaatctgcaagtggatatttggacctctctgaggatttcgttggaaacgggataactgcacctaactaaacagaagcattctcagaaacttctttgtgatgtttgcattcagatcccagagttagaccttcctttgatagttcaggtttgaatcactctttttgtaggatctgcaagtggatatttggaccactctgtggccttcgttggaaacgggtacaacttcacataacatctagacagaagccttctcagaaacttctctgtggtgattgcgttcaactcacagagttgaacgctcctatggataaagcagttttgaatctctctttttgtggaatctgcaagtggatatgtggacttctttgaatatttccgtggaaacgggaatatctttatatgaatactaaacagaagcattctcagaaacttctctgtgatgtttgtgttcaactcacagtgtttcacgttgcttttcatagagcagttctgaaacattcttttcgcagtgtctacaagtggacatttggagagctttcaggcctgtggtggaaaagaaattatcgtcacataagaactagagagaagaattgtcagaaatttctttgtgatgattgcattcaactcaaagagttgaaggttccttttcaagcagccgtttgcaaacactctttctgtggaatgtggaagaggatatttggacgtctttgaagatttcgttggaaacatgataatcttcccagaaaagctaaacagaagcattctcagaaacttattcgtgatgtttgcattgaactcatagagttgaactttccttttgagagagaagctttgaaacactctttttctagaatctgcaagtggacatttggagggctttgaggcctgtgttggaaaaggaaatatcttcccgtaaaaactagagagaagcattctcagaaactactttgtgatgattgcattcaagtcatggatttgaacattctctttgacagagcagtttggaaactctctttttgtagaatctgcaagtggagatatggaccgctttgaggcctatggcagtaaaggaaataacttcatataaaaactagacagtagcattctcacaaaactctttgtgacgactgagtttatctcacagagctgaacattcctttggatggagtagtttcgaaacacactttttgtagaatctgcaagtggatatttggaactctgagtatttttttggaaacgggttaaaattcacagaactaaacagcagcattctcagaaatttctttgtgatgttggccttcaactcacagagtggaacattccttttgatagagtagttttgaaacactctttttgtagaatctgcaagtggacattttgtgtgctttgaggcctgtggtgggaaaggaaatgtcttcacttaaaatctagagagaagcgttctcagaaacttctttgggagatttgctttcaactcacagatatgaaacttccttcaatattttagatttgaagcagtctttttgtaggatctgcaactggacattcgcagcattttgaggtccgtgcaagtaaaggaactatcttcatataaaaactagtcagaagctttctcagaaccatctttgtgatgtgggtatgcagctcacaatgttgtacctttcctctgatagagcagttttgaaactctctttttgtagaatctgcaagtagacattaggagcgctttgagtcctgtggtgtaaaaagaaatatctacacattaaaagtagagagaagcattgtcagaaacttcttcgtgatgattgagttcaagacacagagttgaagagtcacagtgtttgcagtttgcaaacactttctgtagaatctgcaagtggatattgggagctctttgaagatttcgttggaaatgggataatcgtcactaaaaactaaacagaagcattctcagaaacttctttgtgatgttttccttcaactcacagagttcaacattcctattgatagagcagttttgaaacactcctttctagaatctgcaagtggatttttggtgtgcctgtgatggaaaaggaaatatcttcacctaaaaactagagagaaacagtctcagaaacttcgtagtgatgttgacagtcgacgcatagagttgaacgctcccttaacacgaggagttttgaaacactctttttgtggaatctgcaagtggatatttggacacctttgaagatttcgttggaaacgggattatcttcacttaaaaactaaacagaagcaatctcagaaacttctttgtgatgtttgtattcaactcagagattttaacattgcttttcgtagagtagttttgaaacatcctttccgtagtatctgcacgtcgaaatttggagcgctttgaagcctgcggtggaaaaggaaatatcttcacatgaaaactagagggaagcactgtcagaaacttcttcgtgatgattgcattcaactcacagagttgaagattcctttcaaaacagcagtttggaaacactctttttctaggatctgaaagtggacatttggagggcttcgaggcctgcggtggaaaacgaaatatcttcatataaatactacataaaagcattctcagaaactactttgtaatgatgtcattcaactcagggagctgaacaattcttttgatagagcagttttgaaaccctctttttgtagagtctgcaaatgtaaatatggaccgctttgaatcctttggtaggaaaggaaataacttcatataaaaaaaaagccagaagcattctcagaaacttctttgtcatgattgacttcaaaacacagagttgaacattccttttgatgcagcagtttcaaaatacacttttcgtagaatctgcaagtggatatttggaactccttgaggatttctttggaaacgggttaaaattcacagaacaaaacagaagcattctcagaaagttctttgtgatgttggccttcaactcacagagtggaacattccttttgatagggcagttttgaaacactctttttctagtatctgcaagtggacatttggtgtgctttgaggcctgtgttgggaaaggaaataacttcacttaacatctagagagaagcattctcagaaacctcttttggagatttgcattcaactcacagagttaaaacttcctttgatagttcagatttgaaacactctttttgtagaatctgcaactggacattggcagcaatttgaggtcagtgctagtaaaggaactatcttcatataaaaacttggaagaagctttctcagaaacttctttgtgatgtgggtatgcaactcacaaagttgaacctttcctttgatagagcagtttgaaactctctttttgtagaatctacaagtagacattttgagcacttagagacctgccatggaaaagaaaatatctacacattaaaactagagagaagcattgtcagaaacttcttcatgatgattgagttcaactctcagagttgaagagtcctttttaaacagcagtttggaaacactcttctgtagaatctgcaagtggatatttggagctctttgaatatttcattggaaacgggataatcttcactaaaaacaaaacagaagcattgtcagtagcttctttgagatgtttgccttcaactcacagagttcaacattccttttgatagagcagttttgaaacactctttttctagaatctgcaagtggacattggctgtgccttgaggactctgctggaaatggaaatatcttcacctaaaatctagagagaagcattctcagaaacttcgtagtgatgtttacagtcgactcatagagttgaacgttcccttaacaagagcagttttgaaacactctttttgtagaatctgcaagaggatatttggacatctttgaagatttctttggaaacgggaatatcttcacttaaaaactgaagagaagcattctcagaaacttctttgtgatgtttgtattcaactcacagattttaacattgcttttcatagagcagttttgaaacattctttccgtagaatttgcacgtagacatttggagcactttgaagcctgcggtggaaaaggaaatatcttcacataaaaactagagggaagcactgtcagaaacttcttcgtgatgattgcattcaacccacagagttgaagattcattttgaaacagcagtttggaaacaccctttttctaggatgtgcaagtggacatttggagggctttgaggcctgcggtgggaaatgaaatgtcttcacatgaatactacataaaagcattctcagaaactactttgagatgatatcattcaactcagagagttgaacattccttttgatagagcaggtttgaaaccctctatttgtacagtctgcatatggaaatatggacggctttgaagcctatgctagtaaaggaaataacttcatataaaatacagctcagaaacttctttgtcatgattgacttcaagacacagagctgaacattccttttgatgcagcagtttcgaaacacactttttgtagaatctgtaagtggatatttggaactctttgaggatttcattggaaacaggttaaaattcacagaaataaacagaggcattctcagaaagttctttgtgatgttggtcttcaactcacagaatggaacattccttttgatagagcagttttgaaacaccctttttctagaatctgcaagtggacatttggtgtgctttgaggcctgtggtgggaaaggaaatatcttcacttaaaatctagagagaagcattctcaggaacttctttgggagatttgctttcaactcacagagttgaaacttcctccgatagttcagatttgaaacactctttttgtagaatctgcaactggacattggcagcaatttgaggtccgtgtaagtgaaggaaatatcttcatataaaactaggcagaagctttctcagaaacttctttgtgatgtgggtatgcaactcacaaagttgaacctttcctgtgatagagcagttttgaaactctctttttgtagaatctgcaagtagacattaggagcgctttgtgtcctgcattggaaaaggaaatatctacacattaaaactagagagaagcattgtcagaaacttcttcgtgatgattgagttcaactcacagagttgtagagtgctttttaaacagcagtttggaaacaatctttctgtagaatctgcaagtgaatatttggagctctttgaagacttcgttggaaacgggataatcttcactaaaaactaaacagaagcattctcagaaacttctttgtgatatttgacttcaactcacagcattcaacattccttctgatagagcagttttgaaacactctttttctagaatctgcaagtggattgttggtgtgcctgtggtggaaaaggaaatatcttcacctaaaacctagagagaagcattctcagaaacttcgtagtgatgtttacattcgatgaatagagctgtacgttcccttaacaagagcagttttgaaacactctttttgtagaatctgcaagtggatatttggacacctttgaagatttcgttggaaactggaatatcttcacttaaaaactgaacagaagcattctcagaaacttctttgtgatgcttgtattcaactcacagattttaacattgcttttcatagagcagttttgaaacattctttccgtagaatctgcacgtagacatttggagtggtttgaagcctgcggtggaaaaggaaatatcttcacataaaaactagagagaagcactgtcagaaactttgtgatgattgcattcaactcacagagttgcagattccttttgaaacagcagtttggaaacactctttaggtaggatctgcaaggggatatttggcgttctttattgcttttcatagagcagttttgaaacactctttttctagaacatgcaagtggacatttggagggctttgaggcctgtggtggaaaaggaaacatcttcacatataaactagagagaagcattctcagaaacttctttgtgatgtttgtattcatctcactgattttaacattgcttttcatagagcagttttgaaacattctttccgtagaatctgcaagcagacatttggagcgctttgaagcctgttgtggaaaaggaaatatcttcacataaatagtagagagaagcattctcagcaacttgtttgtgatgagtgcattcaactcacagagttgaacattccttttggtagagcggttttgaaacactctttttctagaatctgcaagtggacatttggagggctttgaggtctgtggtggaaaaggaaatatcttcacatataaactagaaagaagcattctcagaaacttctttgtgatgagtacattcaactcacagagttgaacattcctattgatagagcagttttgaaaccctctttttgtagattctgaaggtagagatatggaccgctttgaagcctactgtagtaaaggaaataacttcatattaaagccagccagaagcattttcagaaacttctttgttttgattgagttaaactcacagagctgaacattccttttgatggagcagtttcgaaacacactttttgtagaatctgcaagtggatatttggacctctttgaggatttcttcagaaacgggttaaacctcacataactaaacagaagcattgtcagaaacttctttgtgaggtttgtattcaactcacagagttgaaccttccttcgagagttcaggtttgaaagactctttttgtagaatgtgcaactttacattaacagcgctttgaggtccgtgcaagtaaaggaaatatcttcatattaaagctagacagggagaagaggaaaggcaagggaaggggttagagtggtgtgtgcatggagggggtggggatgggaaggctgatgaggatggacagagacggtctctgataagatttgtttcttttgcctctcccctctcccctctcccctctcccttctcccctctcccctctccctctcggtctccctctccctctctttccatggtctccctctgatgccgagccgaagctggactgtactgctgccatctcggctcactgcaacctccctgcctgactctcctgcctcagcctgcccagtgcctgcgattgcaggcgcgcgccaccacgcctgactggttttcgtacttttttggtggagacggggtttcgctgtgttggccaggctggtctccagctcctaaccgcgagtgatccgccagcctcagcctcccgaggtgccgggattgcagacggaggctggttcactcagtgcccaatggtgcccaggctggagtgcagtggcgtgatctcagctcgctacaacctccatctcccagccgcctgccttggcctcccaaagtgccgagattgcagcctctgcccggccgccaccccgtctgggaagtgagaagcgtctctgcctggccgcccatcgtctgggacgtgaggagcccctctgcctggctgcccagtctggaaagtgaggagcgtctctgcccggccgccatcccatctaggaagtgaggagcgcctcttcccggcagctatcccatctgggaagtgaggagcgtctctgcccggccgcccatcgtctgagatgtggggagcgcctctgccccgccgccccgtctgggatgtgaggagcacctctgccaggccgcgaccccgtatgggaggtgaggagcgtctctgcccagccgccccgtctgagaagtgaggagcccctctgcccggcagccaccccgtctgggaagtgaggagcgtctccgcccggcagccgccccgtccgggagggaggtggggggatcagccccccgcccggccagccgccccgtccgggaggtgaggggcgcctctgcccagccgcccctactgggaagtgaggagcccctctgccgggccagccaccccgtccgggagggaggtggggggctcagcctcccgcccggccagccgccccgtccgggagggaggtgggggggtcnnnnnnnnnnnnnnnnnnnnnnnnnnnnnnnnnnnnnnnnnnnnnnnnnnnnnnnnnnnnnnnnnnnnnnnnnccccccgcccggccagacgccctgtctgggagggaggtgggggggtcagccccacgtccgggagggaggtgtgggggggtcagccccctgccaggccagccgccccgtccgggagggaggtggggtcagccccccgcccggccagccgccccgtccgggaggtgaggggcgcctctgcccagccgcccctactgggaagtgaggagcccctctgccgggccagccaccccgtccgggagggaggtagggggctcagccccccgcccggccagccgccccgtccgggagggaggtggggggtcagccccccgcccggccagccaccccgtccggggggtgaggggcgcctctgcccggccgcccctactgggaagtgaggaacccctctgcccggccagccgccccctccgggagggaggtgggggggtcagccccccgcccggccagccgccctgtctgggagggaggtgggggggtcagccccccgcccggccagccgccccatgcgggaggtgaggggcgcctctgcctggccgcccctactaggaagtgaggcgccccgctgcccggccagccgccccgtccgggagggaggtggggggtcagccccctgcccggccagccgccccatccgggaggtgaggggcgcctctgccccgccgcccctactgggaagtgaggagcccctctgcccggccaccaccccgtctgggaggtgtacccaacagctcattgagaacgggccgggatgacagtggcggttttgtggaatagaaaggggggaaaggtggggaaaagattgagaaatcagatggttgccatgtctgtgtagaaagaagtagacatgggagacttttcattttgttctgtactaagataaattcttctgccttgggatcctgttgatcggtgaccttacccccaaccctgtgctctctgaaacatgtgctgtgtccactcagggttaaatggattaagggcggtgcaagatgtgctttgttaaacagatgcttgaaggcagcatgctcgttaagaatcatcaccactctctaatctcaagtacccagggacacaaacactgcggaaggctgcagggtcctctgcctaggaaaaccagagacctttgttcacttgtttatctgccgaccttccctccactattgtcctatgaccctgccaaatccccctctgcgagaaacacccaagaatgatcaataaaaaaaaaaaaaaattaaaaaaaaaataaaaataaaaaaaaaaaattaaagctagacagaagctttctcagaaactcctttgtgatgtgttcattgaactgacagagttgaaccattgttttgatagagccattttgaaacactatttttgtagaatctgcaggtggacatttggagcgctttgacatctatagtgaaaatgatatatcttcacataaaaactgtacagaagcattctcagaaacttctttgtgctgtttgctttcaactcacaggcttgaatattccttttcatagagcagttttgaatcactgtttttgtggaaattgaatgtcgatatttgaaccactttgagtccttcgttggaaacggaacaccttcatataaaaactagacagaagcattgacagaaacttctttgtgatgtatgcattcaactcacagagttgaacctttcttttgatagagcagttttgaagccctctttttnnnnnnnnnnnnnnnnnnnnnnnnnnnnnnnnnnnnnnnnnnnnnnnnnnnnnnnnnnnnnnnnnnnnnnnnnnnnnnnnnnnnnnnnnnnnnnnnnnnnnnnnnnnnnnnnnnnnnnnnnnnnnnnnnnnnnnnnnnnnnnnnnnnnnnnnnnnnnnnnnnnnnnnnnnnnnnnnnnnnnnnnnnnnnnnnnnnnnnnnnnnnnnnnnnnnnnnnnnnnnnnnnnnnnnnnnnnnnnnnnnnnnnnnnnnnnnnnnnnnnnnnnnnnnnnnnnnnnnnnnnnnnnacagttttgaaacacgctttttgtagaatctgcaagtggacatttggagatctttgaggtctatgatgaaaaaggcaatatcttcactcaaaaactaccatcagagtgaacaggcaacctacaaaatgggagaaaattttcgcaacctactcatctgacaaagggctaatatccagaatctacaatgaactcaaacaaatttacaagaataaaacaaacaaccccatcaaaaagtgagtgaaggacatgaacagacacttctcaaaagaagacatttatgcagccaaaaaacacatgaaaaaatgctcatcttcactggccatcagagaaatgcaaatcaaaaccacaatgagataccatctcacaccagttagaatggcgatcattaaaaagtcaggaaacaacaggtgctggagaggatgtggagaaataggaagacttttacactgttggtgggactgtaaactagttcaaccattgtggaagtcagtgaggcgattcctcagggatctagaactggaaataccatttgacccagccatcccattgctgggtatatacccaaatgagtataaatcatgctgctataaagacacatgcacacgtatgtttattgcggcattattcacaatagcaaagacttggaaccaacccaaatgtccaacaatgatagactggattaagaaagtgtggcacatatacaccacggaatactatgcagccataaaaaataatgagttcatgtcctttgtagggacatggatgaaattggaaatcatcattctcagtaaactatcgcaagaacaaaaaaccaaacaccgcatattctcactcataggtgggaattgaacaatgagatcacatggacacaggaaggggaatatcacactctggggactgttgtggggtgggaggaggggggagggatagcattgggagatatacttaatgctagatgacgagttagcgggtgcagcgcaccagcatggcacatgtatacatatgtaactaacctgcacaatgtgcacatgtaccctaaaacttaaagtataataaaaaaaatttaaaaacaaaatggctgaaaaaaaactgcacagaagcattctcagaaacttcctcatgacgtttgctttcaactcacagagttgaaccgtaattttcctacagcagttttgaaacactcttgttgtagaatttgcatgtggttacattgaccgctatgaggccttcgttggaaacgggataacttcccataaaatctagacaaaagcattcacagaaacttctttgtgatgtgtgcatccaactcacaaatttgaacctttcttttgatagaccaattttgaaacactctttttgtagaatctgcaagtggacttttggagcgtttggaggtctgtggtgaaaatggaaatatcatcacataaaaactacacagaagcattctcagaaacttctttggcatttttgctttcaactcacagagttgaacattccttttcatagagcagttttcaaacactctttttgtcgaatttgcaagtgtatatttggaccaatttaaggccatcgttggaaacggaatatattcacattaaaatcagacagaagcattctcagaaacatctttgtgatggtgaaaaggaaatatcttcacataaatactgcacagaagcattctcagaaacttctatgtgctgtttgctttcaactcagagttttgaacattccttttcagagagcagttttgaaactctctttttgtggaatttgcaagtcgatatttttaccagtttggggccttcgttggaaacggaataccttcacataaaaactagacagaataattgacaggaacctctttgtgatgtatgcattcagctcacagaatttaacttttcttttgatagagcagttttgaaagactctttgtagaatctgcaagtggacatatggagcactttggggccagtgtagaaaaacgaattcttttcacataaaaagtagacagaggcattctcagaaacttcttttggaagtgggcattcaactcacagagttgaacctttcttttcatagagcagatttgaaacatcctttctgttgaatttgcaagtggatacttggacggcatagagtccttcattggaaacggggtatcttcaaatcaaaactatacagaatctttctcagaaacttctttgcaatgtgttcattcgactcacagagatgaacttttttttttgattgagcagttttgaaacactctttttgtagaatctgcaagtggacatttggagtgctttggggcctatggtggaaaaggaaatatcttcacataaaaactagacaaaaggattctcagaaacttctttgtgattagtgcattcaactcacagagttgaatctttcttttgatagagcagttttgaaacactctttttgtagaatttgcatatggttatattgaccactttgaggccttcgttggaaatgggatatcttcaaatcaaaactatacagaagcattctcagaaacttctttgtaatgtgttcattcagctcacagggatgaacctttcttttgattgagcaattttgaaacactctttttgtagaatctgccagtggacttttggagccctttgggtcctaaggtgaaaaagaaaatatcttcacataaaaactagacagaaggattctcagaaacttctttgtgatgagtgcattcaactcagagagttgaatctttgttttgatagagcagttttgaaacactctttttgtaggatttgcttgtggttatattgaccgctttgaggccttcgttggaaacggaatatctcacnnnnnnnnnnnnnnnnnnnnnnnnnnnnnnnnnnnnnnnnnnnnnnnnnnnnnnnnnnnnnnnnnnnnnnnnnnnnnnnnnnnnnnnnnnnnnnnnnnnnnnnnnnnnnnnnnnnnnnnnnnnnnnnnnnnnnnnnnnnnnnnnnnnnnnnnnnnnnnnnnnnnnnnnnnnnnnnnnnnnnnnnnnnnnnnnnnnnnnnnnnnnnnnnnnnnnnnnnnnnnnnnnnnnnnnnnnnnnnnnnnnnnnnnnnnnnnnnnnnnnnnnnnnnnnnnnnnnnnnnnnnnnnnnnnnnnnnnnnnnnnnnnnnnnnnnnnnnnnnnnnnnnnnnnnnnnnnnnnnnnnnnnnnnnnnnnnnnnnnnnnnnnnnnnnnnnnnacattttgagcgctttgaggccaatagagaaaaaggaaatctcttcacataaaaactacacagaagcattctcagaaacttctttgtgatgtttgcgttcaactcacagagttgaactttcttttcatagagcagatttgaaacaccctttctgttgaatttgcaagtggatatttggacctccaagaggccttcgttggaaacaagatatcttcacctaaaaaccagacagaagcattctcagaaacttctttgtgatgtgtgcattcaactcacagagatgaacctttcttttgatagggcagtttggaaaaactctttttgtagaatctgcatgtggacatttggagcactttgaagcctatgatgaaaaaggaaatctcttcacataaaaactagacagaagcattctcagaaacttctttgtgatgagtgcattcaactcacagagttgaatctttcatttatagagcagtattgaaacagtccttttgtagaatctgcatgtgtacatttagagtgctttgaggcctatggtgaaaaagggaatatcttgatataaaaactacacagaagtattctcagaaactcctttgtgatgtgtgcattcaacacacagagttgaaccttcgttttgatagagcagttttgaaccacgctttttgtagaatctgcatgtggacatttggagagtcaagggtctctggtgaaaaaggaaatatcttcacttaaaaactacatagaggcattctcagaaacttccttgtgacgtttgctttcaactcacagagttgaacattacttttcatagagcagttttaaaacactctttttgtagtgtttgctggtggatatttggagctcattgaggtcttcgttggaaacgggatatcttcacatgaaaaccagacacaagcattcacagaaagttatttgtgatgtgtgcattcaactcacagagttgaacctttcttttgatagagcagttttgaaacactttttttgtaggatctgcaagtggacatttggagcgctttgaggcctatcatgaaaaaggagatatcttcacataaaaactgcacagaagaattctcagaaacttctttgtgctgtttgctttcaactcacagagttgaacattccttttcatagaacagttttgaaacactttttgtggaatttgcaagtcgatttttttaccactttcaagcctttgctggaaacggaataccttcaaataaaaacgagacagaaccattgacagaaacttctttgtgatgtatgcgttcaactcacagagttgaacctttcttttgatagagcagttttgaaacactctttttgtagaatctgcaagtggacattttgagcgctttgagttcaatggagaaaaagggaatctcttcacataaaaactacacagaagcattctcagaaacttctttgtgatgtgtgcattcaactcacagagttgaacctttcctttcatacagcagatatgaaacactctttctggtgaatttgcaagtaggtatttggaccgcttagagaccttcattcaatacgagatatcttcacataaaaactagacagaagcattctcagaaactactttgtgatgtgtgcattcaactcacagagatgaacatttctgttgatagagcagttttgaaagaatctttttgtagaatctgcaagaggacatttggagcactttgaggcctttggtgaaaaaggaaatatcttcacataaaaactagacagaagcattctcataaacttatttgtgatgagtgcactcaattaacagagttgaacttcttcttttgatacagcagttttggaacactctttttgtagtatctgcaagtggacatttagagtgctttgagacctatggtgaaaaacggaatatcttcacataaaaactacatagaagaattctcagaaacttctttgtgttgtgtgcattccactcactgagttgaaactttcttttgatagagcagttttgaaacactctttttgtagaatctgcaagtgaacatttgagtgctttgaggactgtggtgaaaaaggaaatatcgtcacataaaaactacacagaagcattctgagtaccttctttgtgatgcttgctttcaactcagagagctgaacattaattttcctactgcagttttgaaacacactttttgaagaatttgcacgtggatagttggaccaccttgcggccttcgttggtaacaggatatcttcacataaaaggcagacagaagaattctcataaacttgtttctcatgtgtgaattcaactcacagagttgaacatttttttttgatagagccatattgaaacaatctttttgtaaaatctgcaggtggacattcggagcgctttgaggcctatggtgaaaaagcaaatatcttcacataaaaactgcacagaagcattctgagaaacttctttgtgcagtttgctttcaactcacagagttgaacattccttttcatagagcagtttgggaacactctttttgtggaatttgcaagtcgttatttgtaccactttgaggccttcattggaaacactataccttcacataaaaactagacagaatcattgacagagagtcctttgtgatgtatgcgttcaactcgcagaattgaacctttcttttgatagagcagttttgcaacactctttttgtagaatctgcaagtggacacttgcagtgctttgttgccaatggagaaaaatgaaatctcttcacataaaaactgcacagaagcattcacagaaacttctttgtgatgtgtgcattcaactcacagagataaacctttcttttgatagaccagttttgaatcactctttttgtagaatctgcaagtggacatttggagcgctttgaggcctttggtgaaaaaggaaatatcttcatataaaaactagagagaaacattgtcagaaacttctatgtgatgagtggattcaactcaaacagttgagtctttcttttggtagagcagttttgaaatactctttttgtagtatctgcaagtggacattttgagtgctttgagacctatgatgaaaaagggaatatcttcacataaaaactacacagaagtattctcagaaacttctttgtgatgtgtgcgttcaacagacagagttgaacctttcttttgagagagcagttttgaaacactctttttgtagcatctgcaagtgaacatttggagagctttgcggtctacggtgaaaaaggaaatatcttcacttaaaaattacacagaagcattctcagaaacttccttgtcacgtttgatttcacctcacagagttgaacattaattttcctccagaagttttgaaacactctttttgtagaatttgcatgtggatatttggactactttgaggctttcgttggaaacaggctgtcttcacataaaaactggacagaagcattcacagaaacttgtttgtgatgtttgcatccaactcacagatttgaacctttcttttgatagagcagttttgaaacactctttttgtagaatctgcaattggacatttgagcgctttgaggtctgtggtgaaaaaggaaacatcttaaaaaaaaactacacagaagcattctcagaaacttctttgtgatgtttgctttcacctcacagatttgaacattccttttcatagagcggttttgaaacactcattttgtagaatttgaaagtgggtatttggaccactttgagaccttcattggaaatgggatatcttcacataaaaagcagacagaagcattctcagaaacttctttgtgatgtgtgcattcaactcacagaggtgaaattttcttttgatagagcagttttgaaacactctttttgtagaatctgcaagtggacatttggagtgctttgaggcctatggtgaaaaagtaaatatcttcacataaaaactgcacagaagcattcccagaaacatctttgtgctgtttgttttcaactcacagagttgaacagtacttttcataagcagttttgaaacactctttttgtggaatttgcaagtcgatatttgtgccactttggggtcttcattggaatcggaataccttcatataaaaactatacagaggcattgacagaaacttctttgtaatgtatgtgttcaactcaaagagttgaacctttcttttgatagagcagttttgaacgactgtttctgcagaatctgcaagtggacatttgagcgctttgaggcttgcagtgaaaaaggaaatatcttcacattaaaactacacagaagcattctcattaacttctttgtgatgtttgctttcaactcacggagttgaaaattccttttcatagagcagtttttaaacactgtttttgttgaatttgccagtggatatttggaccgcttagaggccttggttggaaacgagatatcttcacataaaagcattctcagaaacttctttgtcatgtgtgcactcaactcacagaattgaacgtttctttcgatagagcagctttgaaataccctttttgcagaatctccacgtggacatttggagcactttaaggccaatggagaaaaacgaaatctcttacaaggaaatatcttcacttaaaaactacacaggagcattctcagaaacttccttgtgacgctgactttcaactcacagagttgaacattaactttcctacagcagttttgaaacacttttttgtagaatttgcaagtggacatttgagcgactttgaggctatcgttcgaaacgggctatcttcacatgaaaactagatggaagcattcaaagaaacttctttgtgatgtgtgcattcaactcacagagttgaacctttcttttgatagagcagatttgaaacactctttttgtagaatctgcaagtggacatttagatgcattgtggccaatggagaaaaacaaaatctcttctcataaaaactacacagaagcattctcataaacttctttgtgatgtttgctttcacctcacagagttcaacattcctttcatagagcagttttgaaacactctttttgtagaatctgcaagtggatatttgtaccactttgaggccttcgttggaaacggtatatcttcacataaaaagcagacagaagcattctcagaaacttctttgtgatgtgtacattcaagtcacagagatgaacatttcttttgatagagtagttttgaaacactctttttgtagaatctgcaaggggacatttggagtgctttgagtcctttggtgagaaaggtaatatcttcacataaaaactacactgaagtattctcagaaacttctatgtgatgtgttcattcaactcatggagttgaacctttcttgtgatagagcagttttcaaacactctttttagagaatctgcaagtggacactttcagagctttgtggtctatggtgaaaaaggaaatatcttcacttaaaaactacacagaatcgttggcagaaacttccttgtgacgtttgctttcaactcacagagttgaacattaattatcctatagcagttttgaaacactctttttgtagaatttgcatgtgaatatttggaccactttgaagctttcattggtaacgggataacttcacatgaaaactagacagaagcattcacagaaacttctttgtgatgtgtgcctccaactaacagagtggaactttttttttttacagtagttttgaaacactctttttgtagaatctgcaaggggacatttgagagctttgaggcctgtggtgaaaaaggaaacatcttcacataaaaactacacagaagcattctcagaaacttctttctgatgtttgctttcaactcacagggttgaatattccttttcatagagcagttttgaaacactctttttgtagaatttgcaagtggatatttggaccactttgaggccttagttggaaacgggatatcgtcaataaaaagcagacagaagcattatcagaatcttctttgtgatgtctgcattcaactcacagagttgaacctttcttttgatagagtcgttttgaaacactctttttgtagaatctgaagtgggcatttggagtgttttgaggcctttggcgaaaaaggaaacatcttcacataaaaactagacagaagcattctcagaaacttctttgtgattaatgtattcaactcacagagttgaatctttcttttgatagagcagttttgaaactctctttttgtagaatctgctagtggacatttagagtgctttgaggcctacagtgaaaaagggtatatcttcacataaaaactacacagaagtgttctcagaaacttctttgtgaagtgtgcattcaactcacggagttgaacttttattttgattgagcagttttgaaaaccctttttgtagaatctccaagtggacatatgagcgtttgaggcctgtggtgaaaaaggaaatatcttcacataaaaactgcacagaagcattctgaaaaacttctttgtgatgtttgctttcaactcactgagttgaacattcgttttcatagagcagttttgaaatactatttttgtagaatttgcaattggatatttggtccactttgaagccttcgttggaaacgggataccttcagataaacaccagacagaagcattctcagaaacttctatttgatgtgtgtattcaactcacaaagttgaacctttcttttgatagagccgttttgaaacactgtttttgtagaatctgcaaatggacatttggagcgctttgaggcctaaggggaaaaagaaatatcttcacataaaaactgcacagaagcattctcagaaacttctttgtgctctttgctttcaactcacagagttgagcattccctttcatagagcagttttgaaacactctttttgtaggatttgcaagtggatatttggaccactttgcggccttcgttggaaacgggatatcttcacataaacaccagacagaagcattcttagaaagttctttttgatgcgtgcattctactcacacagttgaacctttcatttgatagagctgttttgaaacactatttttgtagaatctgcaagtggacgtttggagtgttttgaggcctatggtgaaaaagaaatatcttcacataaaaactacacagaagcattctcagaaacttgtttttcctgcttgctttcaactcacagagttgaacattccttttcatagagcagttttgatacactatttttgtggaatttgcaagtcgatatttgtaccactttgaggccttcgttggaaacggaataccttcacataaaaactagacagaagcattgacagaaacttctttgtgatgtatgcattcaacacatagagtttaacttttcttttgatagagcagttttgaaagactctttttgaagaatctgcaagtggacatttggagccctttgaggacaatgaagaaaaacgaaatatcttcatataaaaacaatacagaggcattctcagaaacttctttgtaatgtgtgcattcaactcacagagttgaacctttcttttcatagaggagatttgaaaaactctttctgttgaatttgcaagtggatttttggaccgctcagaggccttcattggaaacgggatatcttcacatttaaaactagacagaagcattctcagaaacttttttgtgaggtgtgcattcaactcacagagatgaacctttcttttgatagagcagttttgaagcactctttttttaggatcttcaagtggacattttgagcgctttgatgcctttgctgaaaaaggaaaaattagcacagaaaaactagacagatgcattctcagaaacttctttgtgatgagtgcattcaactcacagagttgaatctttgttttgatagagcagttttgaaacactctttttgtagaacctgcaagtggacatttggagcgctttgaatcctacgatgaaaaaggaaatatcttcacatgataattgcatagaagcattcttagaaacttctctgtgctgtttgctttcaactcacagagttgaacattccttttcatagagcagatttgaaacactctttttgtggaatttgctagtcgatatttgtaccactttgaggccactgttggaaatggaataccttcacataaaaactagatagaagctttgagagaaatttctttgtaatgtgtgcattcaactcacagagttgaacctttcttttgatagagcagttttgaaagactctttttgtagaatctgcaaatggacatttggagcgctttgaggccaatggaggaaaatcaaatctcttcacataaaaactatatagaagcattctcagaaactttttgtgatgtgtgcattcaactcactgagttgaacctttcttttcatagagcagatttgaaacactctttctgctgaatttgcaagtgtatatttggacctcttagaggccttcgttggaaatgggatatcttcacataactagacagaagtattcacaggaaattttttgtgatgtgtgcattcaactcagagagtttaacctttcttttgatggagaagttttgaaacattcttttggtaaaatctgcaagtgaacatttggagagctttgaggttaatggtgaaaaaggaaatatcttcacttaaaaactacacagaagcattctcagaaacttctttgtgacgtttgctttcaactcagagagttgaacattaatttccatatggcagttttgaaacactctttatgttgaatttgcatgtggatatttggagcactttgaggctttcgttggaaacaggatatcttcacataaaatctagacagaagcactcacagaaacttctttgtaatgtgtgtatccaactcacctagttgaacctttcttttgatagagcagttttgacacactatttttgtagaatctgcaagtggacatttcagcgctttgaggcctgtggtgaaaaaggaaatatgctcacataaaaaccacacagaagcactctcagaaacttctttgtgatgtttgctttcaactcacagagttgaacattccatttcatagagcagttttgaaacactctttttgtaggatttgcaagtggatatttggaccactttgaggccttcgttggaaaagggatatcttcacataaaaacagagagaagcattctcagaaacttctttgtgatgagtgcattgaactcacagagttgaatctttcttttgatagagcagttttgaagccctctttttctagaatctgcaagtggacacttggtgcgctttgaggcatatggtgaaaaagggaataccttcacataaaaactacacaggagtgttctcagaatcttctttgtgatgtgtgcattcaactcacagagtggaacctctcttttgatagagccgttttgaaacactatttttgtggaatttgaatgtcgatatttgtaccaatttgaggccttctttggaaacggaataccttcacataaaaactggacagaagcattgacagaaacttccttgagatgtatgcattcatctcacagttttgaacctttcttttgatagagtggttttgaaagactctttttgcagaatctacaagtggacatttggagcgctttgaggccaatggagaaaagcgaaatctcttcacagaaaaactacacggaagcattctcagaaacttctttgtgatgtttgctttcaactcacagagttgaacattccttttcatagagcagatttgaaacactctttttgtggaatttgcaagtcgatatttttaccactttgaggccttcattggaaacggaataccttcacataaaaactagatagaagcattgagagaaacttctttgtaatgtatgcattcatctcacagaattgaaccttttttttgatagagcagtcttgaaagcctctttttgtagaatctgcaactggacatttggtgtgctttgaggccaatggaggaaaatgaaatctcttcacataaaaactatacagaagcattctcagaaacttttttgtgatgagtgcattcatctcacagagttgaactttcttttgatagagcggttttgaaatactctttttgtagaatctgcaagtggacatttatagtgttttgaggtctacagtgaaaaagggaatatcttcacataaaaactgcacagaagaattctcagaaacttctttgtgatctgtgcattcaactcacagagatgaacctttcttttgatagagctgttttgaaaaacactttttgaagtatctgcaagtggacatttggagtgctttgaggcctttagtgaaaaaggaaatattttcacataaaaactagacagaggcatctcagaagcttctttgtgatgtttgctttcaactcacagagttcaactttccttttcatagagcagttttgaaacactctttttgtagaatttgcaagtggatatttggaccactttgaggccttcgttggaaacgggatatctttacacaaaaactagacagaagaattcacataaacttcttcgtgatgtatgcatccaagtcacagagttgaaactttcttttgaaagagcagttttgaaacacactttttgtagaatctgcaagtggacatttggagcgctttgaggccagtggtgaaaaaggaaatatcttcacctaaaaactgcacagaagcattctcagaaacttctttgtgctttttgctttcaacacacagagttgaacattcgttttaatagaacagttttgaaacactctttttgtggaatttgctagtggatatttctaccactttgaggccttcattggaaatggaataccttcccataaaaactagacagaagcattgacagaaacttctttgtgatgtatgcattcaactcacagagttcaacttttcttttgatagagcagttttgaaacactctttttgtagaatctgcaagtggacgtttggagcgctttgaggccaatggagaaaaacgaaatctcttcacataaaaactacacagaagcattcgaagaaacttctttgtcatgtgtgcattcaactcacagagctgaacctttcttttcatagagcagttttgaaacactctttgtataatttgcaagtgtatatttggactgcttagaggccttcattggaaatgggatatcttcacatgaaaactagacagcagcattctcagaaacttctttgtgatgtgtgcattcaactcacagagatgaaactttcttttgttagatcagttttgaaacactctttttgtagaatctgcaagtggacaattggagctctttgaggcctatggtgaaaaaggaaatatctttccataaaaactagacaaagtcattctcaggaacttctttgtgatgagtgcattcaactcacagagttgaatctttattttgatacagcagttttgaaacactctttttgtagattctgcaagtggacatttagagtgctttgaggcctatgttgaagaggggaatagcttcacatgaaaagtagacagaagcattctcagaaacttctttgtgatgtgtgcattcaactcacagagttgaacgttccttttgatagagcagttttgaaacactccttttgaagtatctgcaagtggatatttgaagtgctttgaggtctacgttggaaacgagaatagcttcacataaaaagtagaaagaagcattctcagaaacttctttgtgatgtgtgcattcaactcacagaattgaaccttcgttttgaaagtgccatttttaaacactctttttgtagaatctgcaagtggatatttggacggttttgaagcctacagtagaaaaggaagtatcttcatacaataactagacagaagctttctcagaagctactttgtgatgtttgcattcaacgcatagagttgaaccttccttttgatagagtagttttgaaacactctttttgaagaatctgcaagtggatatttggagggctttgaggcctttgttggaaacggaaataacttcacataaaaagcagacagaagcattctcagaaacttctttgcgatgtgtgcattaaactaatggagttgagccttcattttgatacagcagttttgaaagatgctttttgtagaatatgcaagtggatattttgatggctttaaggccttcggtgtatatgggaatatcttcacataaaaactagacaaaagcattctcaaaaacttctttgtgatgtgtgcattcaactcacagaattgaacgttccttttgaaagggcagtcttgaaacactctttttgtagaatctgcaagtggatatttagaccgttttgaggtctacggtagataagggaatatctttatataaaaactagacagaagcattctcagaaactactttgtgatgtgtgcattcaactcacagagttgaagattccttttcatagagcagttttgaaacactctttttgtagaatctgcaagtgaatatttggaccgctttgaggccttcgttggaaaagggaatagcttcacataaaaagtagacagaaacattctcagaaacttctctgtgatgtgtgcattcaactcacagagttgaatattccctttgacagagctgttttgaaacactctttttgtagaatctgcaagaggacatttggagcgctatgaagcctgtggaggaaaaggaaatatcttcacatagaaactacacagaagcattctcaaaaagtcttttgtggtgtgtgcattcaactcacagagttgaacttttcctctgatagagcagttttgaaacaccctttttgtaaaatttgtaagtgtacatttggagctctttgaggcctgtggtggaaaaggaaatacattcacatcgaaactagagaaaagcattctcagaaactactttgtgacgtgcgcattgaacttacagagttaaaccttccttttgatagagtagttttgaaacactcttcatgtagaaactgcatgtggatatttggaacgaatttactccttcgtaggaaaagggaatagcttcacataaaaagtagacagaaacattctgagaaacttctttgtgatgtgtgcattcaacccacagaattgaaccttccttttgatggagcaattttgaatcactctttttgcagaatttgcaagtggacatttggagctctttgagaactgtggtggaaaaggatatatcttcaaatagaaaatagaagcgttctcagaaacttcttcatgatatgtgcattcaactcacagaattgaaccttcctttgaaagtgcagttttgaaacactctttttgtagaatctgcaagtggatgtttctacctttttgaggcctatagtggaaaaggaaatatcttcatataaaggtagacagaagcattctcagaaactaatttgtgacgtgtgaattcaactcacagagttgaaaattccttatcacagagcagttttgaaacactctttttgtagaatctgcaagtggatatttttatcgctttgtggccttcattggaaacgggaatagcttcacataaaaagtagacagaagcattctcagaaacttctttttgatgtgtgcattcaactcacagagttgaacattccttttgacagagcagttttgaaacactttttgtagaatctgcaagtggacatttggagcgctttgtggcctgtggtggaaaaggaagtatcttcacatagaaactaagagaagcattctcagaaacttctttgtgatgtgtgcattcaactcacacagtagaacattccttttgatagagcagttttgcatcactctttttgtagaatttgcaagtggacatttggagctctttgaggactgtggtggaaaaggatatatcttcacataggaactagaggaagcattctcagaaacttctttgtgatgtgtgcattcaactcagaatagaacattccttttgacagagcagtttttaaacactctttttttagaatctgcaagtggacattaggagcactttgaagcctgtggtggaaaaggatatatcttcacatagaaactagacagaagcattctcagaaacttctttgtgatgtgtgcattaaacttaaagagttgaaccatccttctgatacagcagttttgaatcattctttttgtagaatttgcaagtggacatttggagctctttgaggactgtggtagaaaaggatatatcttcacatagaaactagagagaagcattctcaggtatccctttgtgatgtgtatattcaactgacggagtttaacttcccttttgatagatcccttttgaaacactctttttgtagaatctgcaagtgggtatttggagcgctttgaggccattgtaggaaacgggaatagcttcacataaaaagtagacggaaacattctcagaaactaccttgtgatgtgtgcatttaactcacagagttgaacattccttttgacagagcagttttgaaaaactgtttttgcagaatatgcaagtgtatatttggagcgctttgagacctgtgtggaaaaggaaatatcttcacatagaaactagacagaagcattctcagaaacttctttgtgatgtgtgcattcaactaacagagttgaagcttcctttttatagagcagttttgaaacacgctttttgtagaatctgcaagtggatattttgacggctttgaggcctttggtgtaaatgggagtatcttcacatacaaactagacaaaagcattctcaaaaacttcttcatgatgtgtgcattcaactaaccgaactgaaccttccttttggaaaaggaaatatcttcacatagaaactagacagaaggattatcacacacttctttgtgatgtgtgcattcacctcacagagtagaacattccttttgacagaccagttttgaaacagtctttttgtggaatctgcaagtggacattaggagcgccttgaggcctgtggcggaaaaggatatatcttcacatagaaactagagagaagcattctcataaagttctttgtggtgtgtgcattcaactcacagaattgaaccttcgttttgaaatttccattttgaaaccctctttttgtagaatctgcaagtggatatttgaaccgttttgaggtctacagtataaaaggaaatatcttcatactaaaactagacagaagcattctcaggagctacattttgatgtttgcattcaactcacagagttgaaccttcctttgcatggagcagttttgagaccctgttttttaagtttctgcaagtggatatttggagtgcgttgaggccttcattggaaacaggaggagcttcacataaaaagtagaaagaagcattttcagaaacttctttgtgatgtgtgcattcaactcacacagtagaacattcctttcgacagagcagtattgaaacactctttttgtagaatctacaagtggacattaagagcgctttgaggcctgtgttggaaaaggatatatcttcatataaaaactagacataagcattctcagagacttccttctgacgtgtacattcaacacacagagttgatagagcccttttgaaacattctttttgtagaatctgcaagttgatatttggagcgcttggaggccttcgcaggaaacgggaatagctttacatagaaactagacagaagcattctcagagactactttgtgatgtgtacattcaactcagagagttgaacatccctttagatagagccattttgaaaccctctttttgtagaatttgcaagtggatatttggagcgctttgaggccttcgttggaaacggaatagcttcaaagaaaaagtagacagaagcattctcagaaacttctttgtgatgcttgcattcaactaacagtgttgaactttccttttgataggacagctttgaaacacgctttttgaagtatctgcaagtggatatttggagtgctttgagaccttcattggaaaagggaatagctccacataaaaatagagagaagcattctgaaaaactaatttgtgatgtgtgcattcaactaacagagttaaaccttccttttgatagagcagttttgaaacactctttttgaagaatctgcaactggatatttggattgctttgaggccttcattggaaacgggagtagcatgccatgaaaaagtagacagaagtattctcagaaacttctttgtgatgtgtgcatttaactaaaagatttgaaccttccttttgatagagcagttttgaaacactctttttgaagaatctgcacgtggatatttggagtgctatgaggcctgtggtagaaaatgaaatatcttcatataaaaactagacagaagcattctcagagactactttgtgatgtgtacattcaactcacagaattgaacatccctttagatagagcccttctgagacagactttttgtagaatctgcaagtggatatttggagcactttgaggccttcattggaaacgggagtagcttcacttaaaaagtagacagaatcattctcagaaacttctttgtaatgtgtgcattcaactcacggagttgaacattccttttgaaagagctgttttgaaacactctttttgtagaatctgcaagtggacatttggagcgctttgaggcctgtgtggaaaaaaaaatcttcacagagaagctagacagcagcattctcaaaaacttctttgtgatgtgtgcattcaactaacagagttgaactttccttttgatagagcagttttgaaacatgctttttgtagaatctgcaagtggatattttgacgactttgaggcattccgtgtaaatgggaatatcttcacataaaaactagacaaaagaattctcaaaaactcctttgtgatgtgcacattcaactcacagaattgaaaattccttttgaaacagcagttttgaaacactctttttgtagaatctgcatgtggacatttggagtgatttcaggcctgtggtggaaaaggaaatatcttctcatagaaacttgacagaagcattcccagaatcttcttgtgatgtgcacattcagctcaacgagttgaacatcccttttgagagagcccttttgaaacacactttttgtagaatctgtaagtggatatttggaccacttttaggcctatggtggaaacgggaatagcttgacataaaaagtagacagaagaattatcagaaactactttgtgatgtgtgcattcaagtcacagagttgaaccttttttttgaaagagcagttgtgaaccactctttgaatgtgcaagtggacagttggagctctttgaggcctgtggtggaaaaggaaatatcttcaaatagaaactagacggaagcattctcagaaacttctttgtgatgtgtgcattatacttacagagttggaccttccttttgacagagcagttttgaaacactttttgtagaaactgcttgtggatatttggaccgatttgaggccttcgttggaatagggaatagcttctaaaaaaaaaggagacagaagcattctcagaaacttctttgtaatgtgttcattaaacacacagagtggaaatttcttctgatagagcagtttagaaacactatttttgtagaatctgcaaatggacatttggagcgctttcaggcctgtggtggaaaaggaaatatcttcacagagatactagacagaagcattcacaaaaacttctttgttatgtgtacattcaactcacagaattgaacatcccttttgatagagcagttttgaacacggtatttgaagaatctgcaagtggatattttgacggatttgacgccttcagtggatatgggaatatcttcacattaaaactagacagaagcattctcaaaaacaactttgtgatgtgtgcattcaactcacagaattgaactttccttttgaaagagcagttttgaaacactctttttctagtatctgcaagtggatatttgggccgctttgaggcctatggcagaaaaggaaatatcatcatatacaaactagacagaagcattctcagaaactactttgagttgtgttcattcaactcacagagttgaacattacttttgatagagcagttttgaaacaatctttttgtagaaactgcaagtggatatttagaccgatttgaggtcttcgttggaaatgagaatagcttcaaataaaatgagactgaagcattctcagaaacttctttgtgatgtgtgtattcaactcacagagttgaacattccttttgacagagcagtttgaaacactcttttagtacaatctccaagtggatatttggagggctttcaggcttttggtggaatgggaattatcttcagatagaaactagaaagaagctttctgagaaacttctttgtgatgtgtacattcaactcacagaattgaacatcccttttgatagagtggttttgaaacactctttttgtagaatctggaagcagatatttggagcgctttgaggccttcgtgggaaacgggaataacttcacataaaaagtagacagaagcattctcagaaacttctttgtgatgtgtgcattcaactcacagagttgaacattccttttgacagagcagttttgaaacactctttttgtagaatctgcaggtggacacctagagcgctttgaggcctctggtggaaaaggtaatatcttcacatagaaactagagagaagcattctaagaaacctccttttgatgtgtgccttcaactcagagttgaaccttccttttgatagagcagttttgaaacactctttttgtagaaactgcaattggatatttgtaccgatttgaggccttcgttagaaacgggaatagcttcacctaaaaagtacacagaagcattctcagaaacttctttgttatctgtgcattcaactcacagagttgaacattctttttgagagagcagtgttgaaacactctttttgtagaatcttcaagtggagatttggagcgctttgaggcctgtgttggaaaaggaagtatcttcacatagaaactagacagaagcattctgagaaacttctttgtgatatgtgcatttaactcatagagctgaaccttccttttgatagagcagttttgaaacactcttcttgaaggatctgcaagtggatatttggagggctttgaggcctatggtagaaaaggaaatatcgtcatataaaattagacagaagcattctcagaaactactttggatgtttgcattcaactcacagagttgaacattccttttgacagagcagttttgaaacactctttttgtagaatctgcaagaggacatttggagtgctttcaggcctgtggtggaaaagggaatatcttcacatggaaactagacagaagtattctcagaaacttctttgtgatgtgtacattcaactcacagatttgaacaagtcttttgatagagcagttttgaaaccctctttttgtagaatctgcaagtggatatttggactgctttgtggccttcattggaaatgtggttatcttctcataaaaactagacagaagcattctcagaagctactttgtgatgtgtgtattcaactcacagatttgaaccttctttttgctagcacagatttgaaacactctttttctggaatctgctaaaggacatttggagggcttcgagggctacagtggaaaaggaaatatttcacataaacactagacagaagccttctcagaaacttctttgtgatatttgcattcaactcacagagttgaacagaacttttcatagggcagttttttagaaatttttttttgttttttttttttgtttcttttttattattattatactttgttttagggtacatatgcacaatgtgcaggttagttacatatttatacatgtgccatgctggtgcgctgcacccactaaatcgtcatctagcattagttatatctcccaatgacatccctccccccttccccccaccccataacaggcctcagagtgtgatgttccccttaatgtgtccatgtgttcccattgttgaattccgacctatgagtaagaatatgcggtgtttggttttttgtccttgcgagagtttactgagaatgataatttccaatttcatccatgtccctacaaaggacatgaactcatcattttttatggctgcacagtattccaaggtgtatatgtgccacattttcttaatccagcctatcattgttggacatttggattggttccaagtttttgctattgtgaatagtgccacaataaacacacgtgtgcatgtgtttttatagcagcatgatttatagtcctttgggtataaacactctttatgttgaatatgcaagtggatatttagacgggtttgaagccttcgctggaaacgggaatgccttcacatagaaactagacagaagcattctcagaaacttctttgtgatgtatgcattcaactcacagagttgaaacttctttttggtagagcagtcttaaacactctttttggagaatctggaaatggataattggagcgctttgaggcctatggtggaaacgggaatagcttcatgtaaaaactagacagaagcattctcagaaatttatttgtgatgtgtgcattcaactcagagcagagcattcctttggacagagcagttctgaaacactctttttgtagaatttgcaagtgcacatttggagagctttgaggcctgtggtggaaaaggaaatatcttcacatagaaactagagagaaacattctcaggatcttctttgtgatgtgtgcattcaacttactgagttgaaccttccttttgatagagtagttttgaaacactcttttggtagaatctgcaagaggatatttggagtgctttgaggcctgtggtgaaaaaggaaatgtcttcacatagaaacaagacagagcattctcagaaacttctttgtgttctgtgcattcaactcacagggttgaaccttccttttgatagagcagatttgaaacactctttttgaagaatctgcaagtggatattttgatggctttgaggccttcggtggaaatgggaatatcttcacataaaaactagagagaatcattctcaaaaacttctttgtgacgtgtgcattaaactgacagaattgaacctttcttttgaaagaacaattttgaagcactctttgtgtagaatctgaaagcggatatttggaccgctttgaggcctatggtagaaaaggaaatattttcatataaaaagcagacagaagcattctcagaaacttctttgtggtgtgtgcattcaactcacagagttgaacattccttttgatagagcagttttgaaacactctttttgttgaacctgcgagtggatatttggaccgctttgaggcctatggtggaaacgggtgtagcttgtcataaagagtagacagaagcattctaagaaactacattgtgatgtgtgcattcaattcagagttgaaccttcattttgctagagcagttttttttgatatggagtctcgctctgtccccaggctggagtgcagtggcatgatctcagctcactgcaacctccgtctcctgggttcacgccattctcctgcctcagcttcccacatagctgggactacaggtgcccgccaccatgcccagctatttttttttttttttgtatttttagtagcgacggggtttcaccgtgttagccaggatggtctcgatctcctgacctcatgatccgcccgcttcagcctcccaaagtgctgggattacaggcgtgagccaacgcgcctggccagagcagttttgaaacactgttttcgaagtatctgcaagtggatatttggagcgttttgaggcctgtggtggaaaagcatatatattcacctagaaactagggagaagcattctcagaaacttctttgtgatgtgggcattcaacttacagagttgaaccttccttttaatagagcagttttgaaacactcttttggtagaatctgcaagtggatatttggagtgctttgagtcctgtggtagaaaaggaaatatcttcatataaaaactagacagaagcattcttagaaactactttgtgatgtgtgcattcatctcacggagttgaacatcccttttgatagagcagttttgaaacactctttttgtagaaaatgctgtggatatttggaccgatttgaggccttcattggaaacgggaatagtttcacataaaaacgaggcagaagcattctcagaaacttctttgtgatgtgtgcattcaactcacagaattgaaccttcttttgatagagcagttttgaaacactctttttgtagaatctccaagtggacatttggaggacttttaggtctttggcggaaagggaaatatcttcacatagaaactagaaaagcattccgagaaacttctttgtgatgtgtacattcaactcagagagttgaatatcccttttgatagaagagttttgaaacactctttttgtagaatctgcaagtggatatttggagtgctttgaggccttcatgagaaacgggaatagattttcacataaaaagtaaacaaacattctcagaaacttctttgtgatgtctgcattcaacccacagatttgaactttccttttgacagagcagttttgaaaccctctttttgtacaaactgcaattggatatttggaccgatttgagaccttcgttggaaatgggaatagcttcacataaaaagtagacagacgcaatctcagaaacttcttagtgatctgtgcattcatctcacagagttgaacgtttcttttgatagagcagttttgaaatactctttttgtagaatttgcaagtggatatttggagcgctttgaggcctgtggtggaagaggaaatatcttcacatagaaattagggagaagcattctcagaaacttgtttgtgatgtgtgcattcaactcaccgaattgaaccttccttttgatggagcagtttggaaacacgctttatgaagaatctggtagtggatattttgatggctttgaggccttcggtagaaatgggaatatcttcatataaaaactagacagaaacattctcaaaaacatgtttttgatgtgtgcattcaactcacagaattgaactttccttctgaaagagcagttttgaaacaatctttttgtagaatctgcaagtggatatttggacagctttgaggcctgtggtggaaacgggaatagcttgacataaagagtagccagaagcattctcagaaacttatttgtgatgtgtgcattcaactcacagtgttgaaccttccttttgatagagtagctttgaaacagtctttttgaatgatctgcaagtggatatttggagtgttttgaggcctgtgttagtaaagaaaatatcttcatataaaaactataaaaactagacagaagcattctcagaaactactttggatgtttgcattgaactcacagagttgaacattccttttgacagagaagttttgaaacactctttttgtagaatatggaattggatatttggagcgctttcagtcctgtggtggcaacgggaatagcatcacataaaaacaagacagaaacattctcagaaacttatttgtgatgtgtgccttcatctgacagagttgaaacttgcttttgatcaagcagttttgaaacactctttctgtagcatttgcacatggacatgtggagcgctttgaggcctctggtggaaaaggaaatatcttcatatagaaactagacagaagcattctcagaaacttctttgtgatatgtgcattcaactcacagagttgaaccttccttttgataaagctgttttgaaacatcttgttgcagaatttgcaagtggatatttggaccactttgaggcctacagtagaaaaggaaatatcttcacataaaaacctgacagaagcattctcagaaactactttgtgatgtgtgctttcaactcaccgagttgaacattccttttgatagagaagttttctaacactctttttgtagaatcagcaggtgaatatttggaccgctttgaggacatcaatggaaaagggaatagcctcacataaaaggtagacagaagcattctcagaaacaactttctgatgtgtgcattcacctcacagagttgaaccttccttttgaaaaagcagttttgaaacactctttttgaaggatctgcaagtggatatttggagtgctttgaggcataaaagaaaatatcttcatataaaaactagacagaagcattctgagaatctactttggatgtttgcattcaactcacagagttgaacattctttctgatagagcagttttgaaacactctttttgtagaatctgcaagtggatatttggaacgcttttaggcctatggtggaaacgggaatagcttgacgtaaagagcaggcagcagcattctcagaaactactttgtgatgtgtgcattcaactaacagaattgaaacttccgtttgatagagtacttttgaatcactctttttgtagaatttgcaaatggacatttggagctctttgaggactgtggtggaaaaggatatagcttcagatagaaactagagagaagcattctgagaaacttctttatgatgtatgcattcaactcacagaagtgaaccttcgatttgaaagtgccgttttgaaacactcttttggtagtatctgcaagtgtatatttggaccgtattgaagcctacagtagaaaaggaaatagcttcatataaaaactagacagaagcattctgagaatctactttgcgatgttttcattcaactcacagagttgaaccttccttttgatagagcagttttgaaacactgatttgaagaacctgcaagtggatatttgtactgctttgaggccttcattggaaatgggaatagcttcacataaaaagtagacagaagcattctcagaaacttctctgtgatgtgtgtattcaactcacagagttgaatattccttttgacagagctgttttgaaacactctttttgtagaatctcaagtggacatttggagcactttgaggcctgcggtggaaaaggaaatatcttcacatagaaattagagagaagcattctcataaacttctttgtaatgtgtgcattaaacttacagagttaaaccttccttttgatagagcagttttgaaacactctttttgtagaatcgacaagtggacatttggagctctttgagtcctgtggtggaaaaggaaatatcttcacctagaaactagacagaagaattctcagaaacttctttgtgatgtgtgcactcaactcacagagttgtacctttcttctgatagaggagttttgaaacactttttttgtaaaatttgtaagtggacatttggagctctttgaggcctgtggtggaaaaggaaatatcttcacatagaaactagagagaagcattgtcagaaagtactttgtgatgtgtgcattaaacttatagagttgaaacttccttttgatagagcagttttgaaacagtctttttgtggaaactgcgtgtggatatttggaccgatttgaggccttctttggaaaagggattagattcacagaaaaagtagacagaagcattctcaggaacttctttgtgatgtgtgcattcaactcacagagagaacattcttttgacagaacagttttgaaacactctttttgtagaatctgcaagtggacattaggcgcgctttaaggcctgtggtggaaaaggaaatatcttcacatacaaactagatataagcattctcagaaacttctctgtgatgtttgcattcaactcacagagttgaagcttcctttgatgatagagcagttttcaatcacttttttgtggaatttgcaagtggacatttggagctctttgaggactgtggtggaaaaggatatatcttcacatagaaactagagagaagcattctcagaaacttctttgtgatgtgtgcattcaactcacagaattgaacctcctttttgaaagtgccgttttgaaacactctttttgtgtaatctgaaagtagatatttgggccgttttgaagcctccagtagaaaaggaaatatcttcatataaaaactagacagaagcattgtcagaagctactttgtgatgtgtgcattcaactcacagagttgaaccttccttttgatagagcagttttgaaacactctttttcaagaatctgcaagtggatatttggagtgctttgaggcctttattggaaacgggaatagcttcacataacaagtagacagaagaattttcagaaacttctttgtgatgtgtgcattcaactatcagagttgaaccatccttttgttagagcagttttgaaacagtctttttgaagaatctgcaagtggatatttggagtgctctgaggacttcgttggaaacggaaatagcttcatataaaaagtagacagaaccattctcagaaacttctttgtgatgtgtacattcgactaacagagttgaaccttccttttgatagagcagttttgaaacactctttttgaagaatctgcaactggatatttggcctgttttgaggccttcgttggaaacgggattagcatcacattaaaaggagacagaagcattctcagaaacttctttgtgatgtgtatattcaactaacagagttgaaccttccttttgatagagcagttttgaaacactctttttgaagaatctgcaagtggatatttggagtgctttgaggcctagggtagaataggaatatcttcatataaaaactagatagaaactttctcagagacttctttgtgatgtgtacattcaactcacagagttgaacatcccttttgatagagcccttttgaaacactctttttgtagcatctgcaagtgaatatttggagcactttgagggcttcttaggaaatgggaagagcttcacataaaaagaagacagaagcattctcagaaacttctttgtcatgtgtccattcaactcacataattgaacattccttttgacagagcagttttggaacacacttttttgtagaatctggaagtggatattttgagtgctttgaggcctgcggaaaaggaaatatcttcacatagaaactagacagaagcgttctcagaaactactttgcaatgtgtgccttcaactaagagagttgaaccttccttttgatagagctgttttgaaacacgctttttttttgaatctgcaaatggatattttgacggctttgaggccttcagtgtaaatgggaatatcttcacatagaaactagatgaaagcattctcaaaaacttctttgtgatgtgtgaattcatctcacagaactgcactttccttttgaaagagcagttttgaaacactctttttgtagaatctgtaagtcgatatttgcacgggtttgaggccaacagtagaaaaggaaatatcttcatataaaaattagacggaagcattctcagacactactttgtgatgtgtgcattcaaatcacagagttgaaccttgcttttgatagagaagttttgaaacactcttttggtagaatctgcaagtggatatttggagtgctttgaggcctgtggtagaaaaggaaatgtcttcgcatagaaactagacagaagcattctcagaaacttctttgtgttgtgtgcattcaactcacagggttgaaccttccttttgatagaacagatttgaaacacgctttttgaaggatctgcaagtggatattttgacggctttgaggccttcagtgaaaacaggaatatcttcacataaaaagtagacagaagcattctcagaaacttctttgtgatgtgtgcattcaactgacagaattgaacctctcttttgaaagagcaattttgaagcagtctttgtgtagaatctgaaagtggatatttgtaccgatttgaggcctatggtagaaaaggaaatattttcatataaaaagtagacagaagcattctcagaaacttctctttgatgtgtgcattcaactcacagagttgagcattccttttgatagagcagttttgaaacactctttttcttgaatctgcaagtggatatttggaccgctttgaggcctacggtggaaacgggaatagcttttcataaagggtagacagaagcattctaagaaactgcattgtgatgtgtgcatgcaactcacagagttgaaccttcattttgatagagcaatttcaaaacaatctttttgaaggatctgaaagtggatatttggggcgctttgaggcctgtggtggaaaatgaaatatcttcacatagaaactagatagaagcattctcagaaagtaccttgtgatgtgtgctttcaacttacagatttgaaccttccttttgatagagcccttttgaaacactcttttgttacagtctgcaagtggatatttagagtgcactgagtcctgtggtagaaaaggaaatatcttcatataaacaccagactgaggcattcttagaaacgactttctgatgtgtgcattcaactcacagagttgaacattccttttgatagagcagttttgaaaccctcttcttgtagaaactgcaagtggatatttggaccgctttgaggccttcgttggaaaagggaatagcttcacataaaaatcagacagaagcattctcagaaagttctttgtgatttgtgcattcaactcaaaaatttgaacctttcttttgatagagcagttttgaaacactctttttttagaatctgcaagtggacatttggagcgccttcaggcctgtggtggaaaaggaaatatcttcacatagaaactggacagaagcattcccagaaacttctttgtgatgtgtacattcatctcaccgagttgaacaacccttttgatagagctcatttgaaacactatttttgtagaatctgtaagtggatatatggaccgcttttaggcctatggtggaaacgtgaatagcttgacataaagattagacagaagcattatcagagactactttgtgatgtgtgtattcaactcagacagttgaaccttccctttgatagagcagttttgaaccactctttccgtggaatctgcaagtggatatttttaacgctttgaggcctttgttggaaacgggattagcttcacataaaaagtagacagaagaattctcagaaacttctttgtgatgtgtgcattcaactcacagaattgaacctttcttttggtagagcagttttgaaacactctttttgtagaatttgcaagtggatatttggagctcttttaggcttgtggtggaaaaggaaatatgttcatatagaaactagacagaagcattctcagaaaattctttgtgatgtgtgcattaaagttacagagttggaccttccttttgacagagcagttttgaaacactctttttgtagaaacttcatctggatatttggaccgatttgaggccttcgttggaaaagggaatagcttcacataaaaaggagacagaagcattctcagaaatttctttgtgatgtgtgcattcaacacacagagtggaactttcttttgatagagcagctttgaaacactctttttgtagtatctgcaagtggacatttggagcgctttcaggcctgtggtggaaaaggaaatatcttcacatagaaactagacagaagcattctcagaaacttctttgtgatgtgtacattcaactcacagagttgaacatcccttttggtagagcagttttgaaacacgctttttcaagaatctgcaagtggatattttgatggctttgatgacttcagtgtatatgggaatatcttcacattaaaactagacagaagcattctcaaaaacagctttgtgatgtgtgcattcaactcacagaattgaactttccttttgaaagagtagttttgaaacactctttttgtagaatctgcaagtggatattttaccgctttgaggcctatggcagaaaaggaaatatcatcatatacaaactagaaagaagcaatctcagactactttgagatgtgtgcattcaactcacagagttgaacattacttttgatagagcagttttgaaacaatctttttgtagagactgcaagtggatatttagaccgatttgaggccttcgtttgaaaagggaatagcttcaaataaaatgagactgaagcattctcagaaacttctttgtgatgtgtgcattcaactcacagagttgaacattccttttggtagagcagtttcaaaacactctttctgaaggatctgcaagtggatatttggagtgctttgaggcctgtggtggaaaaggaaatatcttcacatagaaactagacagaagctttccatttgcttggtagatcttcctccatccttttattttgagcctgtgtgtgtctctgcacgtgggatgggtttcctgaatacagcacactgatgggtcttgatttttatccaatttgcctgtctgtgtcttttaattggagcatttagtccatttaaatttaaagttaatattgttatgtgtgaatttgatcctatcattatgatgttagctggttattttggtcgttaattgatgcagtttcttcctagtctcgatggtctttacattttggcatgattttgcagtggctggtaccggttgttcctttccgtatttagcacttccttcaggagctcttttagggcaggcctggtgatgacaaaatctctcagcatttgtttttctgtaaagtattttatttctccttcgcttatgaagcttagtttggctggatatgatattctgggttgaaaattcttttctttaagaatgttgaatattggcccccactctcttctggcttgtagggtttctgccgagagatccactgttagtctgatgggcttccctttgagggtaacccgacctttctctctggctgcccttaacattttttccttaatttcaactttggtgaatctgacaattatgtgtcttggagttgctcttctcgaggagtgtctttgtggcgttctctgtatttcctgaatctgaatgttggcctgccttgctagattggggaatttctcctggataatttccttcagagtgttttccaacctggttccattctccccatcactttcaggtacaccagtcagacgtagatttggtcttttcacatagtcccatatttcttggaggctttgctcatttctttttactctttattctctaaacttcccttctcgcttcatttcattcatttcatcttccattgctgataccctttcttccagttgatagcattggctcctgaagcttctgcattcttcatgtagttctcaagccttggttttcagctccatcagctcctttaagcacttctctgtatcggttattctagttacacattcttctaaatttttttcaaagttttcaacttctttgcctttggtttgaatgtcctcccgtagctcagagtaatttgatcctctgaagccttcttctctcagctcgtcaaaatcattctccatccagctttgttcattgctggtgaggaactgcattcctttggaggaggagaggcactctgctttttagagtttccagtttgggttgcaatcctagtctctgataaaacagactttaaaccaacaaagatcaaaagagacaaagaaggccattacataatggtaaagggatcaattcaacaagaagagctaactatcctgaatatatgtgcacccaatacaggagcacccagattcataaagcaagtcctgagtgacctacaaagagacagactcccacacattaataatgggagactttaacaccccactgtcaacattagacagatcaatgagacagaaagtcaacaaggatacccaggaattgaactcagctctgcaccaagcagacctaatagacatctacagaactctccaccccaaatcaacagaatatacatttttttcagcaccacaccacacctattccgaaattgaccacatagtgagaagtaaagctctcctcagcaaatgtaaaagaacagaaattataacaaactctctcagaccacagtgcaatcaaactagaactcaggattaagaatctcactcaaaaccgctcaactacatggaaactgaacaacctgctcctgaatgactactgggtacataacgaaatgaaggcagaaataaagatgttctttgaaaccaacgagaacaaagacacaacataccagaatctctgggacacattcaaagcagtgtgtagagggaaatttatagcactaaatgtccacaagagaaagcaggaaagatcaaaaattgacaccctaacatcacaattaaaagaactagaaaagcaagagcaaacacattcaaaaactagcagaaggcaagaaataactaaaatcagagcagaactgaaggaaatagagacacaaaaaacccttcaaaaaattaatgaatccaggagctggttttttgaaaggatcaacaaaattgatagaccgctagcaagactaataaagaaaaaaagagagaagaatcaaatagacgcaataaaaaatgataaaggggatatcaccaccgatcccacagaaatacaaactaccatcagagaatactacaaacacctctatgcaaataaactagaaaatctagaagaaatggataaattcctcaacacatacactctcccaagactaaaccaggaagaagttgaatctctgaatagaccaataacaggatttgaaattgtggcaataatcaatagcttaccaaccaaaaagagtccaggaccagatggattcacagccgatttctaccagaggtagaaggaggaactggtaccattccttctgaaactattccaatcaatagaaaaagagggcatcctccctaactcattttatgaggccagcatcattctgataccaaagccggatagagacacaaagaaaaaagagaattgtagatcaatattcttgatcaacattgatgcaaaaatcctcaataaaatactggcaaaacgaatccagcagcacatcaaaaagcttatccactatgatcaagtgggcttcatccctgggatgcaaggctggttcaatatacacaaatcaataaatgtaatccagcagagccaaagacaaaaaccacatgattatctcaatagatgcagaaaaggcctttgacaaaattcaacaacacttcatgctaaaaactcaataaattaggtactgatggaacgtatttcaaaataataagagttatctatgacaaacccacagccaatatcatactgaatgggcaaaaactggaagcattccctttgaaaactggcacaagatagggatgccctctctcaccactcctattcaacatagtgttggaagttctggccagggtaattaggaaggagaaggaaataaagggtattcaattaggaaaagaggaagtcaaattgttcctgtttgcggacgacatgattgtatatctagaaaaccccatcgtctcagcccaaaatctccttaagctcataagcaacttcagcaaagtctcaggatacaaaatcaatgtacaaaaatcacaagcattcttatacactgacaacagacaaacagagagccaaatcatgagcgaactcccattcacaattgcttcaaagagaataaaatacctaggaatccaacttacaagggatgtgaaggacctcttcaaggagaactacaaaccactgctcagtgaaataaaagaggatacaaacaaatggaagaacataccatgctcatgggtaggaagaatcaatatcgtgaaaatgaccatactgcccaaggtaatttacagattcaatgccatccccatcaagctaccaatgactttcttcacacaattggaaaaaactactttaaagttcatatggaaccaaaaaagagcccgcatcaccaagtcaatcctaaggcaaaagaacaaagctggaggcatcatactacctgacttcaaactatactacaaggctacagtcaccaaaacagcatggtactggtacaaaaacagagatatagatcaatggaacagaacagagccctcagaaataatgctacatatctacaactatctgatttttgacaaacctgagaaaaacaagcaatggggaaaggattccctatttaataaatggtgctgggaaaactggctagccatatggagaaagctgaaactggatcccttctttacaccttatacaaaaatcaattcaagatggattaaagacttaaacgttagacctaaaaccataaaaaccctagaagaaaacctaggcattaccattcaggacataagcatgggcaaggacttcatgtctaaaacaccaaaagcaatggcaacaaaagacaaaattgacaaatgggatctaattaaactaaagagcttctgcacagcaaaagaaactaccatcagagtgaacaggcaacctacagaatgggagaaaatttttgcaacctcctcatctgacaaaggactaatatccagaatctacaatgaactcaaacaaatttacaagaaaaaaacaaagaaccccatcaaaaagtgggcaaaggacatgaacagacacttctcaaaagaagacatttatgcagccaaaaaacacatgaaaaaatgctcatcatcactggccatcagagaaatgcaaatcaaaaccacaatgggataccatctcacaccagttagaatggcaatcattaaaaagtcaggaaacaacaggtgctggagaggatgtggagaaataggaacatttttacactgttggtgggactgtaaactagttcaaccattgtggaagtcagtgtggcgattcctcagggatctagaactagaaataccatttgacccagccatcccattactgggtatatacacaaaggactataaatcatgctgctataaagacacatgaacacgtatattcattgcagcattattcacgatagcaaagacttggaaccaacccaaatgtccaacaatgatagactgggttaagaaaatgtggcacatatacaccgtggaatactatgcagccataaaaatgatgagttcatgtcctttgtagggacgtgggtgaaattggaaatcatcattctcagtaaaatatcacaagaacataaaaccagacactgcatattctcagtcataggtgggaattgaacaatgagatcacatggacacaggaaggggaatatcacactctggggactgttgtggggtggggggaggggggagggatagcattgagagatatacctaatgctaaatgacgactttgtgggtgcagggcaccagcatggcacatgtatacatatgtaactaacatgcacaatgtgcacatgtaccctaaaacttaaagtataataataaaaaaagaagaaactagacagaagcattcttagaaactagtttgtgatgtgttcataaaactcaccgagttgaacattagttttgatagagcagttttgaaacactctttttgtaggaaatgcaagtggatatttggaccgatttgaggccttcattggaaacgggagttgtatcacatgaaaacgaggcagaagcattctctgaaacttctttgtgatgtgtgcattcaactcacagagtcgaacatcccttttgatagagcagttttgaaacacgctttttgaaggatctgcaaatggatattttgatggctttgaggccttcagtggatatgggaatatcttcatataaaaactagacagaagcattctcaaaaacaactttgtgatgtgtgcattcaactcacagaattgaactttccttttgaaagagcagttttgaaacactctttttgtagaatctgcaagtggatatttcaccactttgaggcctaccgcagaaaaggaaatatcgtaatatagaaactagacagaagcattctcagaaactactttgagatgtgtgcattcaactcacagacttgaacattacttttatagagcagttttgaaacaatctttttgtagaaactgcaagtggatatttagactgatttgatgccatcgttggaaacgggaaaagcttcaaataaaatgagactgaagcattctcagaaacttctttgtgatgtgtgcattcaactcgcagagttgaaccttctttttgatagagcagttttgaaaccctcttgttgcagtattttcaagtgtatatttggactgctttgatgcctacagttgaaaatgaaatatcttcacataaaaaccagacagaagcattctcagaaactactttgagatgtgtgcattcaactcacagagttgaacatcccttttgacagagcagttttgaaatactctttttgtagaatttgcaagtggacatttggagatcttcaaggcctgtggtggaaaaggaaatatcttcacatagaaactagacagaagcattctcagaaacttctttaggatgtgtgcattcaactcatatagttgaacctttcttctgatagagcagttttgaaaaactcttttgtagaatttttaagtggacatttggaactctctgaagcctgtggtggaaaaggagatatcttcacatagaaattagagagaagcattctcagaaactaatttgtgatgtgtgcattaaactgacagagttgaaccttccttttgaaagagcagtttggaaacactctttttgtagaatctgcaagtcgatatttgaaccgctttgagacctatggtagaaaaggaaatataaaaactagacagaagcattcccagaaactactttgtgatgtgcgcattcaactctcagagttgaacattccttttcatagagcagttttgacacactctttttggagaatctgcaagtggatatttcaatggctttgaggccttcgttggtaatgggaatagcttcccataaaaagtagacggaaacattctcagaaacttttcagtgatgtgtgcattcaactcatagagttgaacattccttttgaaagagcagttttgaaaccctctttttgcagagtttgcaagtggatatttggagctctttgaggcctgtggtggaaaaggaaatatcatcacatacaaactagacagaagcattctcagagacttttgtgatgagtacattcaactcaaagagttgaaccattctattgatagagcaattttgatacactaatttgtagaatttgaaagtggacatttggagctctttgtggcctgtggtggataaggaaatatcttcacaaagaaactagagagaaggattctcagaaacttctttgtgatgtgtgcattaaacttacagagttgaaccttcctttggatagagcagctttgaaatactctttttgtagaaactgcatgtggatatttgcactgagttgaggccttcattggaaaccggaatagcttcacataaaaagaagacagaagcattctcagaaacttctttgtgatgtgcgcattcaactcacagagtggaacctttcttttgatagagcagttttgaaacactcgttttgtagaatctgcaagtggacatttggagcgctttcaggcctgtggtggaaaaggaaatatcttcacatagaaaatagggagaagaatactcagaaacatctttgtgatgtgtgcattaaaatcacagagttgaacatcccttttgatagagcagttttgacacactctttttgtacaatttgcaagtggatatttggagctctttgaggattgtggtggaaaaggaaatatcttcacatagaaactagagggaagcattctcagaaactactttgtgaagcgtgcattcaactcacagaattgaacgtttgttttgaaaatgcagttttgaaacactctttttgtagaatctgcaagtggatatttgtacggcttagaggccttcgttggaaacgggatatcttcatataaaaactacagagaagaattctcagaaactaatttgtgatgtgtgaattcaattcacagagttgaactttccttatcatagagcggttttgaaacactctttgtaggatctgcaagtggatatttttattgctttgaggccttcgttggaaacgggaatagctgcacataaaaagtagacagaagcattctcagaaacttctttgtgaagtgtgcattcaactaacagagttgaacattctttttgatagagcagttttaaaacactctttttgtagaatctgcaagtggagatttggacagctttgagggctatggtagaaaaggaaatatcttcatataaaaactagacagaagcattctcagaaactactttgtgatgtgtgcattcaactcacagagttgaacattccttttgatagagcagttttgaaacactctttttgtagtatctgtaactggatatttgtacctctttgaggccttcgttggaaactggtttagcttcacataaaaagtagacagaagcattctcagaaacttctttgtgatgtgtgcactcaactcacagagtagaaccttccttttgatagagcagttttgaaacactctttttgtagaatttgcaagtggacatttggaactctttgaggcctgtggtggaaagggaaatatcttcacatagaaactagacagaagcattttcagaaagttttgtgatgtgtacattcaactcacagagttgaacctttctattgatagagcagttttgaaacactatttttgtagaaattgaaagtggatatttggagctctttgaggcctgtggtggaaaaggaaatatcttcacgtagaaactagagaaggattctcagaaacttctttgtgatgtgtgcattaaacttacagagttgaaccttccctttgatagagcagttttgaaacactccttttgtagaaactgcgtgtggatatttgcacccagttgaggccttcattggaaaccagaatagcttcacataaaaaggagacagaaacattctcagacacttctttgtgatgtgtgcattcaactcacagagtggaacctttcttttgatagagtagttttaaaacactcgttttgtagcatctggaagtggacatttgagcgttttcaggcttgtggcggaaaaggaaatttcttcccatagaaactagggagaagaattctcagaaacttctttgtgatgtgtgcattgaactcacagagttgaacatcccttttgatggggcagttttgaaacactctttttgtacaatttgcaagtggatatttggagctctttgaggactgtggtggaaaaggaaatatcttcacatagaaactcgagataagcattctcaaaaacttctttgtgatgtgtgcattcaactcacagaattgaaccttcgttttgatagtgaagttttgaaacactctttttgtagaatctgcaagtggatatttggaccgctttgtggcctgcagtagaaaaggagatatcttcatataaatactatacagaagcattctcagaaactaatttgtgatgtgtgaattcaactcacagagttgaactttccttatgacagagaagttttgaaatactctttttgtagaatctgcaagtggagaattggagcgctttcaggcctgtggaggaaaaggaaatatcttcgcatagaaactagacagaagcactctcagaaacttctttgtgatgtgtacattcaactaacagggttgaacgccccttttgatagaacagttttgaaacactctttttgtagaatccgcaagtggatatttggagcgctttgaggccttcattggaaacggaatagcttcaaagaaaaagtagacagaagcattctcagaaacttctttgtgatgtgtgcattcaactaacagagttgaaccttccctttgatagagcagttttgaaacactctttttgaagaatctgcaagtggatatttggagtgcttggaagcctatggtagaaaagttaatatcttcatataaaaactagacagaagcgttctctgagacttctttgtgatgtgtacattcagctcacagagttgaacatcccttttgatggagtcttttggaaacacgctttttgtagaatctgcaagtggatattttgacagctttgaggccttcggtggaaatgggaatatcttcatataaaaactaggcaaaggcattttcaaaaacttctctgtgatgtgtgcattcatgtcacagaattgaaccttccttttgaaagagcagtcttgaaacactctttttgtagaatctgcaagtgaatatttggaccgctttgagggctacggtagaaaaggaaatatcttcatataaaaactagacagaagcgttgtcagaaactgctttgtggtgtgtgcattcaactcagagagttgaagattccttttcatagagaagttttgaaacactctttttgtagaatatgcaactggatatttctaccgctttgaggctttcattggaaacgggtttagcttcacataaaaagtagacaaaagcattctcagaatcttctttgtgatgtatacattcaacacacagagtttaacattccttttgacagagtagttttgaaacactctttttgtagaatctacaagtgggtatttggagtccttgtggcttgtggtggaaaaggaaatatcttcacataaaaactagacagaggcattctcaaaaacttctttgtgatttgtgcattcaattctcagagttgaacattcattttgacagaacagttttgaaacactcattttgtaggatctgccagtggacatttggagcgctttgaggcctttggtggaaaaggaaatatcttcacatagaaactagacagaagcattctcagaaagttctttgtgatgtgtgcattcaactcacagaattgaaccttccttttgatagagcagttttgaatcaccttttttgtagaatttgcaagtggacatttggacctctttgaggactgtggtgtaaaacggtatatcttcacatagaaactagagagaagaattctcagaaacttgtttatgatgggtgcattcagctcactgaaatgaaccttcgttttgaaagtgcagttttgaaacactgttttgtagaatctgcaagtggatatttgcaccacattgaggcatagagtagaaaaggatatatctttatataaaaattagacagaaggattctcagaaggtactttgtgatgtgtgcattcaactcacagagttgaactttccttttgatagagtagttttgaaacactctttttgaaggatctgcaagtggatatttgcagtgctttgaggccttcattggaaacgggattagcttcacataaaaagtatacacaagcattctcataaacttctttgtgatgtgtgtattcagctaacagacttgaaccttccttttgatagggcagttttgcaacactctttttgaagaatctccaagtggatatttggattgctttgaggcctatagtagaaaaggaaatatcttcatataaaaactagagagaaggattctcagagacttctttgtgatgtgtacattcaactcacagagttgatcatcccttttgatagagtcttttgaaacactctttttgcagaatctgcaagtggatatttggagcgctttgaggcttcgtaggaaacaggaatagcttcacataaaaagtagacagaagcattctcggaaacttatgtgtgcattcaactcccagtgttgaacattacttttaacagagcagttttgaaatactctttttgcagaatctgcaagtgtacatttggaacgctttgaggcctgtatggaaaaggaaatatcttcacatagaaaatagacagaagaattctcagtaactactttgtgatgtgtgtattcaactcacagagttgaaccttcctttcgatagagcagttttgaaacactctatttgtagaatttgcaagtggacatttggagctttttgaggcctgtggtggaaaaggaaatatcttcacatagaaactggacagaagcactctcagaaacttctttgtgatgtgtgcattcaactcacagatttgaacctttcgtctgacagcagttttgaaaccctctttttatagaatttgtaagtcgacatttggaccgctttgaggcctacagtagaaaaggaaataacttaattaaaaactaggcagaaccattcccagaaactactttgtgatgtgtgctttcaactcacagagttgaacattcctttttcatagagcagttttgacacactctttttgtaaaatctgcaagtggacacttgttctgctttgaggccttcgttggaaacgggaatagcttcacataaaaaataggcagaagcattctcacaaacttttctgtgatgtgtgcattcaactcacagagttgaacatttcttttgacagagcagttttgaaacactttttttgtggaatctacaagtggacattaagagtgctatgaggactgtggtggaaaaggaaatatcttcacatagaaactagacagaagcattctcagaaacttctttgtgatgtgtgcattcaaatcacagagtggaatcttcctgttgatagaacagttatgaatccctctttttgtagaatttgcaagtggacatttgcagctctttgaggagtgtggtggaaaaggatatgtcttcacatagaaactagagatgcattctcagaaacttctttgtgatgtgtgcttcaactcacagaattgaaacttcgttttgaaagtgcagttctgaaacactctttttgtagaatctgcaggtggatatttggattgctttgaggcctacagtagaaaaggaaatatcttcatataaaaactagacagaagcattttcagaaactactttgtgatgtgtgcattcaactcacagagttgaaccttgcttttgattaagcagttttgaaacactcttttgggagaatttgcaagtggacatttggagcgctttgaggcctgtggtggaaaaggaaatatcttcatatagaaaccagagagaaccattctccaaaacttctttgttggtgtgtgctttcaatttacagagttgaaccgtccttttcctagagctgttttgaaacactcttttggtagagtctgcaagtggatatttggaggactttgagtcctatggtagaaaaggatatatcttcatataaaaactggagtgaggcattcttagaaactactttctgatatgtgcattcaactcacagagttgaacattcctgttgatagagcagttttgaaacactttttttagaaactgaaagtggatatttggaccgaactgagggctatggtagaaaaggaattatcttcatataaaagctagacagaagcattctcaaaaacttctttgtgatgcgtgcattccactcacagagttgaacattccttttcacagagaagttttgaaacactctttttgtagaatctgcaagtggacttttggggtgctttgaggcttgtggtggaataggaaatatattcacataaaaactagacagaagcattctcaaaaacttctttgtgatgtgtgcattccactcacagagttgaacattccttttcacagagaagttttgaaacactctttttgtagaatctgcaattggacatttggagcgctttgacgcctgtggtggaaaaggaaatatcttcacaaagaaactagacagaagcattctcagaaacttctttgtgatgtgtgcattcaactcacagagttgaaccttccttttgatagaacatttttgaaatacgctttttgtagaatctgcaagtatatattatgacggatttgaggccttcggtgtaaatggtaatatcttcatataaaaactacacaaaagcattctcaaaaactactttgtgatgtgtgcatttaactcaccgaattgaatcttccttttgaaagagcagtattgaaacactctttttgtagaatctgcaagggcatatttggaccgctttgaggcctatggtagaaaagaaagtatcttcaaataaaaactagacagaagcattctgagaaactacattgtgatgtgtgcattcaactcacatagttgaacattcctttccatagagctgttttgaaacactctttttgtagaatctgcaagtggatatttgaatgcttggaggtcttcgttggaaacgggaatagcttcacataaaaagtagagagaagcattctcagaaacttctttgtgacgtgtgcgttcaactaacagatttgaaccttccttttgatagagcagttttgaaaaactgtttttgaagaatctgcaagaggatatttggagtgctttgaggccttagttggaaaggggaatagcatcacatacaaagtagacagaagcattctcagaaacttctttgtgatgtgtgcattcaactaatagagttgaaagttccttttgatagagcagttttgaaaaactctttttgaaaatctgcaagtggatatttggagtgctttgaggcccatggtagaaaaggaaatatcttcatataaaaaccagacagaatctttctcagagacctctttgtgatgtgtgcattcaactcacagaatagaacattcctttccatagagccattttgaaacactctttttgacgaatctgcaagtggatacttggagcactttgaggccttcgttggaaatgggaatagcttcacataaaaagtagacagaagcattgggagaaacttctctgtgatgtgcgctttactcactgagttgaacattccttttgacagagcagttttgaaacactctttttgtggaatctgcaactggacatttggagcactttgaggcctgtgtggaaaaggaaatatcttcacaaagaaactagacagaagcattctcagaaacttctttgtgatgtgtgcattcaactaacagaattgaaccttccttttgatagaacagatttgaaatatgctttttgtagaatctgcaagtggatatttggaatgcttggaggcttcgttgggaaacgggaaaagcttcacataaaaagtatacggaagcattctcacaaacttctttgtgatgtgtgcattcaactcacagaggtgaaactttcttttgatagagcagttttgaaacgctctttttgtaaaatctgcaagtggacatttggaactctttgaggcctgtggtggaaaaggaaatatcttcacatagaaactagacagaagcattctcagaaacttctttgtgatgtgtgcattcaactcacagagttgaacctttcttttaatagagcagtttggaaacactctttttgtaggaactgcatgtggatatttggacagattagaggccttcgttggaaaaggatatagcttcacataaaaagtagacagaagaattctcagaaacctctttgtgatgtgtggattcaactcacagaattgaatcttcattttgaaagtgcagttttgaaacaccctttttgtagaatctgcaagtggatatttggactgttttgaagcctacagtagaaaagggaatatcttcatataaaaactagacagaagcattctcagaagctactttgtgatttgtgcattcaactaatagcgttgaaccttccttttgataaagcagttttgaaacactctttttgaagaatcttcaagtggatatttggaattcttggaggccttctttggaaacgggaataacatcacaaaaaaaggtagtcagaagcattcttagaaacttttttgtgatgtgtgcattcagccaacaaagttgaaccttccttttgatagagcagttttgaaacactctttttgaaaactgcaagtggatatttggagtgctttgagtcccatggtagaaaaggaactatcttcatataaataccagacagatgctttctcagagacttctttgtgatgtgtgcgttcaactcacagagttcaacatcccttttgatagagcccttttgaaacactctttttgtagaatctgcaagtgtacatttggagcactttcaggcctgtgtggaaaaggaaatatcttcacctagaaactagacagaagcattctcagaaccttctttgtgatgtgtgcactcaactaacagagttgaaccttccttttgatagatcagttttgaaacacgctttttgtagattctgcaagtggatattttgatggctttgaggcctttggtgtaaatgggaatgtcttcacataaaaagtagacaaaagcattctcaaaaacatgtttttgatgtgtgcattcatctcacagaattggaccttcgttttgatagaacaattttgaaacactctttttgtagaatctgcaagtggatatttgtaccgttttgaggcgtatggtagaaaaggaaatatcttttttttttttttttttttgagacggagtctcgctctgtcgcccaggctggagtgcagtggcgggatctcggctcactgcaagctccgcctcccgggttcacgcggaaatatcttcatttaaaaactagactgaagcattcccagaaactaccttgtaatgtgtgcattccactcacagagttgatcattgcttttcatagagcagttttgacacactctttttgcagaatctgcaagtggatatttttaccgctttgaggcctttgttgggaacgggaatagcttcacctaaaaagcagacagaagcattctcagaagcttccctgtgatgtatgcattcaactcacagagttgagcattccttttgacagagctgttttgaaacactccttttgtagaatctgcaagtggacatttggagcactctgaaagttgtcatggaaaaggaagtatctccacgtagaaactagacagaaccattctaaaacttctttgcgatgtgtgcattcaactaacagagttgaaccttccttttgatagagcagttttgaaacactctttttgtagaatttcaagtggacattttgagctctttgaggactgttgtggaaaatgaaatatcttcacatagaaactagacagaagcattctcagaaacttctttgtgttgtgtacattcaactcacagagttgaaccttcctcttgatagagcagttttcaaatactattttggtagaatctacaagtgcatatttggaacgctttgaggtctaatggtagaaaaggaaatattttcatataaaactcgacagaagcattctcagaaactgctttgtgatgtgtgcattcaactcaaaaagttgaacttttcttttgatagagaagttttgaaacactctttttgtagtatctgcaagtggacatttggaatgctttcaggcctgtggtggaaaaggaaatatcttcacttagaaacgagacagaagcattctcagaaacttctttgtgatgtgtacattcaactcacactgtggaacatcccttttgatagagcagttttgaaacactctttttgtagaatctgctagtggatatttggagtgctttgaggcctttggtggaaaagtaaatatcttcacatagaaagtagacagaagcattctcagaaactcctttgcgatgtgtgcattcaactcacaaagttgaacattccttttgatagagcagttttgaaacactctttttgtagagtctgcaagtggacatttgtagtgctttgagatctgtggtgtaaaaggaaatatcttcacatagaaactagacagaagcattctcaggaagtcctttgtgatgtgtgcattcaactcacagagttgaaccttccttttgattgagcagttttgaaacacgcgttttgaagaatctgcaagtggatattttgtcatctttgagggcttcaatggaaatgggaatatcttcacatataaactagacagaagcattctcaaaaacttctttgtgatgtgtacactcaactcaaagaattgaatcttcgttttgaaagagtagttttgaaacactctttttgtagaatctgcaatctgatatttggactgctttgaggcctatggtaaagtaattatcttcatataaaaactagactgattgtccctgtttgcagacgacatgattgtatatttagaaaaccccaatgtctcagcccaaaatctccttaagctcataagcaacttcagcaaagtctcaggatacaaaatcaatgtacaaaaatcagaagcattcttatacgccaacaacagacaaacacagagccaaatcatgggtgaactcccattcacaattgcttcaaagggaataaaatacctaggaatccaacttacaagagatgtgaaggacctcttcaaggagaactacaaaccactgctcaaggaaataaaagaggatacaaacaaatggaagaacatgctatgctcatgggtaggaagaatcaatatcgtgaaaatggccatactgcccaaggtaatttacagattcaatgccatctccatcaagctaccaatgcctttcttcacagaattggaaaaaactactttaaagttcatatggaaccaaaaaagagcccgcatcaccaagtcaattctaagccaaaagaacaaagctggagtcatcacgctacctgacctcaaactatgctacaaggctacagtaaccaaaacagcatggtactggtacaaaaacagagatatagatcaatggaacagaacagagccctcagaaataatgccacatatctacaaccatctgatctttgacaagcctgacaaaaacaagcaatggggaaatgattccctatttaataaatggtgctgggaaaaatggctagccatatgtagaaagctgaaattggatcccttccttacaccttatacaaaaatcaattcaggatggattaaagacttagacgttagacctaaaaccataaaaaccctagaagaaaacctaggcattaccattcaggacataggcataggcaaggacttcatatctaaaaaaccaaaagcaatggcaacaaaagccaacattgacaaatgggatctaattaaactaaagagcttctgcacagcaaaagaaactaccatcagagtgaacaggcaacctacagaatgggagaaaattttagccacctgctcatctgatgaagggctaatatccagaatctacaacgaactcaaacaaatttacaggaaaaaaacaaagaaccccatcaaaaagtgggtgaaggacatgaacagacacttctcaaaagaagacatttatgcagccaaaaaacacatgaaaaaatgctcaccatacctgaccatcagagaaatgcaaatcaaaaccacaatgagataccatctcacaccagttagaatggcaatcattaaaaagtcaggaaacaacaggtgctggagaggatgtggagaaataggaacatttttacactgttggtgggactgtaaactagttcaaccattgtggaagtcagtgtggcgattcctcagggatctggaactagaaataccatttgacccagccatcccattactgggtatatacccaaaggactataaatcatgctgctataaagacacatgcacaagtatctttattgcggcattattcacaatagcaaagacttggaaccaacccaaatgtccaataaagatagactggattaagaaaatgtggcacatatacaccatggaatactatgcagccataaaaaatgatgagttcatgtcttttgtagggacacagatgaaattggaaatcatcattctcagtaaactatcgcaagaacaaaaaaccaaacaccacttattctcactcgtaggtgggaattgaacaatgagaacacacggacagaggaaggggaacatcacactctggggactgttgtggggtggggggacgggggagggatagcattgggagatatacctaatgctagatgacgagttagtgggtgcagagcaccagcatggaacgtgtatacatatataactaacctgcacattgtgcacatgtaccctaaaatttaaagtatatataataataataataataaagaaaaaaaaatctagacagaagcattctcagaaactactttgtgatgtgtgaattcaactcacagatttgaacctcccttttgatagagcagttttgagacactctttttgaagaatctgcaaggggatacttggagtgctttgaagcctatgttagaaaaggaaatatcttcatataacaactagacagaagcattctcagaaacgactttggatgtttgcattaaactcacagaattgaaccttccatttgatagagcagttttgaaacactcttttgaagaatctgcaaggggatatttggagtgctttgaggcctatgttagaaaaggaaatatcttcatataaaaattagacagaagcattctgagaaatgacattggacgtttgcattcaactcacagagttgaacattctttttgatagagcagttttgaaacactcttattgtagaatctgaaagtggatatttggagcgctttgaggcctacggtggaaatgggaattgcttcacagaaaaactagacagaagcattctcagaaacttctttgtgatgtgtgcattcatctcacagagttgaacctttcttttgatagagcagttttgaaacactattttgtagaatttggaactggacattttgagcactttgaagcctgtggtggaaaaggaaatatcttcacatagaaactagagagaaggactctcagaaatatctttgtaatgtgtgcattcaacttacatagttgacccttccttttgatagagctgttttggaacactcttttggtagaatctacatgtgggtatttggagcgctttgattcctatggtagaaaaggaaatatcttcatttaaaaactagacagaaacattcttagaaactactttgtgatgtgttcatgcaactcacagagttcaacattactttagatagagcagttttgaaacacactttttgtagaaactggaagtgaacatttggaccgattttaggccttcattggaaacgggagtagcttcacataaaaacgggacagaagcattctcagaaacttctttgtgatgtctgtattcaactcacagagttgaaccttcctttcgatagagcagttttgaaacactgcttttgtagaatctgcaagtggacatttggagctgtttgaggcctgtggtggaaaaggaaatatattcacatagaaactagagagagccattctcagaaacttctttgtgatgtgtgcattaaacttatagagttgaaccttgcttttgatagagcagttttgaaacactttttgtagaaactacaagtgaatatttggaccaatttgaggacttacttcaaaacgggaatagcctcacataaaaaggagacagaagcattctcagaaacttctttgtgatgtgtgcattcaactcacagagttgaagctttctttcgatagagcagttttgaaacactcttcttgtagaatctgcaagtgaacatttggagggcattcaggcctgtggtggaaaaggaaatatcttcacatagaaactagacagaagcattctcaaaaatttctttttgatgtgtacattcaactcacagagttgaacatccctcttgatagagcagttttgaaacactctttttgtagaatacacaagtggatctttggagcgctttctggcctacagcagaaatggaaacatcttcatataagaactagacagtagcattctcagaaacttctttgtgatgtgtgcatttaactaacagagtgcaactttcttttgatagagcagttttgaaacacactttttgtagtatctgcaagtggatatttggaccgctttcaggccttcattggaaacgggaatagtttcacataaaaagtagacaaaagcattctcagaaagttctctgtgatgtgtgccttcaactcacagagatgaaaagtccttttgatagagaagttttgaaacactctttttgtagaatctgcaagtggatatttggagcgctttgaagccttcggtaaaaaaggaagaatcttcatataaaaaccgacagaagcattcacagaaactactttgtgatgtttgcattcaactcccagaattgaacatttcttttgatagagtagttttgaaactccctttacttagaatctgcaagtggatatttgtagcgctttgaggactacggtggaaacaggaacatcttcacgtaaaaacaagacagaagcattctcagaaacttctttctgatgtgtgcattcaaaaaacagagttgaaacttcgttttgatagagctgttttgaaacactctttttgtagaatctgcaagtggatatttggagcgctttgagtgctatggtagagaagcaagaatcttcttataaaaaccagacagaagcatccacagaaactactttgtgatgtttgcaatcaactcacagagttgaacttttcttttgatagagcagttttgaaacactcctcttgcagaatctgcaaggggatatttggatcgctttgaggacttcgtttgcaaggggaatatcttcacataaaaagtagacagaagcattctcagaaccttccttttgacgtgtgcattcaactcacagagttgaacctttcttatgatagagcagttttgaaacactctttttgtagaatctgcaagtggacatttggagcactttgaggcctttggtggaaaagtaaatatcttcacatagaaagtagacagaagcattctcagaaactcctttgtgatgtgtgcttttaactcacaaatttgaactttcctttttttaaaaatttttttaattttttttattatactttaagttttagggtacatgtgcacattgtgcaggttagttacatatgtatacatgtgccatgctggtgcgctgcacccactaactcgtcatctagcatttccttttgatagagcagttttgatacactctttttgtagaatctgccagtggatatttggagcgatttgaagcctatggtagtaaaggaagtatcttcatataaaaactagaaagaagcattcccagaaactactttgagatgtttgcattcaaatcacgatgttgaacattccttttaatagagcagttttgaaatacacatttgtagagtctgcaagtggatatttggagcgctttgaagccttcattggaaacaggagaatcttcacatagaaactacacagaggtattctcagaaacttatttgtgatgtgtgcattcaactcacaaagttgaacaattcttttgatagagcagttttgaaacactctttttttagaatctgcaagtggacattaggagagctttgaggcctgtggtgcaaaaggaaatatcttcacataaaaagtagacagaagcattctctgaaacgactttgtgatgtgtgcattcaactcacagagttgaacatttcttttgatagagcaattttgaaacactctttttgtagaatctgccagtggttatttgtagcgctttgaggcctgtggtggaaatggaaatatcttcacatagaaactagacagaagcattctcagaaacttatgtgtgatgtgtgcattcaactcacagtgttgaacttttcttttgatagagcagttttgaaacactctttttttagaatctgcaagtagaaattatgagcgctatgaggcccatggtggaaacgggaatatcttcacataaaaagtagacagaagcattctcagaaactcctttgtgatgtgtgcattcaactcacacagttgaacatttcttttcatagagttgttttgaaacactctttttgtagaatctgcaagtggacatttggtgtgctttgaggcctgtggtgtaaaagaaaatatcttcacacagaaactagacagaagaattctcaaaaacttcattttgttgtgtgcactcacctctctgagttgaaccatcctttttatggagcacttttgaaacactctttttctgttcttttacatttgctgaggagagcttcacttccaagtatatggtcaattttggaataggtgtggtgtggtgctgaaaaaaatgtacattctgttgatttaggggtggagagttctgttgatgtctattaggtccgcttggtgtagagctgagttcaattcctgggtatccttgttgactttctgtctcattgatctgtctaatgttgacagtggggtgttaaaatctcccattattaatgtgtgggaatctaagtctctttgtaggtcactcaggacttgcttgatgaatctgtgtgctcctgtattgggtgcatataatttaggatagttagcnnnnnnnnnnnnnnnnnnnnnnnnnnnnnnnnnnnnnnnnnnnnnnnnnnnnnnnnnnnnnnnnnnnnnnnnnnnnnnnnnnnnnnnnnnnnnnnnnnnnnnnnnnnnnnnnnnnnnnnnnnnnnnnnnnnnnnnnnnnnnnnnnnnnnnnnnnnnnnnnnnnnnnnnnnnnnnnnnnnnnnnnnnnnnnnnnnnnnnnnnnnnnnnnnnnnnnnnnnnnnnnnnnnnnnnnnnnnnnnnnnnnnnnnnnnnnnnnnnnnnnnnnnnnnnnnnnnnnnnnnnnnnnnnnnnnnnnnnnnnnnnnnnnnnnnnnnnnnnnnnnnnnnnnnnnnnnnnnnnnnnnnnnnnnnnnnnnnnnnnnnnnnnnnnnnnnnnnnnnnnnnnnnnnnnnnnnnnnnnnnnnnnnnncacaccgatgggtcttgactctttatccaatttgccagtctatgtcttttaattggagcatatagtccatttacatttaaagttaatattgttatgtgtgaatttgatcccgtcgttatgatgttagctggttcttttgctcgttagttgatgcagtttcttcgtagactcgatgggctttacattttggcatgattttgatatcgtgaaaatggccatactgcccaaagtaatttacagattcaatgccatccccatcaagctaaaaatgactttcttcacagaaatggaaaaaactactttaaagttcatatggaaccaaaaaagagcccgcatcaccaagtcaatactaagccaaaagaacaaagctggaggcatcacactacctgacttcaaactatactacaaggctacagtaaccaaaacagcatggcactggtacaaaaacagagatatagatcaatggaatagaacagagccctcagaaataatgccgcatatctacaaccatctgatctttgacaaacctgagaaaaacaagcaatggggaaaggattccctatttaataaatggtgctgggaaaaatggccagccatatgtagaaagctgaaactggatcccttccttacaccttatacaaaaattaattgaagatggattaaagacttaaacattagccctaaaaccatgaaaaccctagaagaaaacctagacattaccattcaggacataggcataggcaaggacttcatgtttaaaacatcaaaagcaatggcaacagaagccaacattgacaaatgggatctaattaaactaaagagcttctgcacagcaaaagaaactaccatcagagtgaacaggccacctacagaatgggagaaaatttttgcaacctcctcatctgacaaaggactaatatccagaatctacaatgaactcaaacaaatttacaagaaaaaaacaaagaaccccatcaaaaagtgggcaaaggacatgaacagacacttctcaaaagaagacatttatgcagccaaaaaacacatgaaaaaatgctcatcttcactggccatcagagaaacgcaaatcaaaaccacaatgagataccatctcacaccagttagaatggcgatcattaaaaagtcaggaaacaacaggtgctggagaggatgtggagaaataggaacacttttacacagttggtgggactgtaaactagttcaaccattgtggaagtcggtgtggcgattcctcagggatctagaactagaaataccgtttgacccagccatcccagtactgggtatatacccaaatgagtataaatcatgatgctataaagacacatgcacacgtatgtttattgtggcattattcacaatagcaaagacttggaaccaacccaaatgtccaacaatgatagactggattaagaaaatgtggcacatatacaccatggaatactatgcagccataaaaaatgatgagtttctgtcctttgtagggacatggatgaaactggaaatcataattctcagtaaactatctcaagaacaaaaaaccaaacactgcatattctcactcataggtgggaattgaacaatgagatcacagggacacaggaagtggaacatcacactctggggactgtggtggggtggggggaggggggagggatagcattgagagatatacctaatgctagatgacgagttactgggtgcagcgcaccagcatggcacatgtatacatatgtaactaacctgcaaaatgtgcacatgtactctaaaacttaaagtataataaaaaaataaaaatgaaaatatatctgttaagacacacacacacacacacacacacacacacacacacacacacaaaagaaacattctttttgtagaatcttaaagtggacatttggagtgctttgaggcctatggtagaaaaggaaatatcttcatataaaaactagacagaatcattatcagaaactactttggatgtttgcattcaactcacaaatttgaacattcctgttgacagaggagttttgaaacactcttttttagaatctggaactagatatttggagcgctttgaggcctacgttggaaacgggaatatcttcacataaatactagacagaagcattctcaaaaacttttttgtgatgtttgcattcaactcacagagctgaagcttccttttgatagagcagttttgaaaaactctttcgttaggatctgcaagtggaaattttgaccgctttgaagtctatggtagaaaagatatatcttcatataaaaaatagacagaagcattctcagaaactactttgcgatgtgcgcattcaactcacagagttgaaactttcttttgatagagcagtttggaaacactctttttgtagagtctgcaagtggatattcggagcgctttgaggcctgtggtggaattggaaatatcctcagatagaaactagagagaagcattctcagaaacttctttgtgacgtgtgcattcaactcagagttgaaaatcccttttcatagagcagttttgaaacactctttttgtagaatctgcaaatggatatttggaccgatttgatgccttctgtggaaacgggaatttcttcacataaaagctaaacagaagaattgtcagaaatttctttgtgatgagtgcaatcaactcacagagttgaaattttcttttattagagcagtgttgaaacactctttttgtagaatctgcaagcgaatattcggaacactttgaggccttcagaggaaaagggaatgtcttcacataaaacaagacagaagcattgttagaaaaaactttgtgatgtgtgcattcaactcacagagttgaaccttccttttgacagagcaattttgaaacactctttttgtagaatctgcaagtggatatttggaccgctttgaggtctatggtagaaatggaaatatcttcatataataactagacagaagcattctcagaaactacgttgtgatgtgtgcattcaactcacagagttgaacattccttttgatagagcagttttgaaacactctttttgtagaatctgatagtggatatttgtaccgctttgaggcctatggtagaaaaggaaatatcttcgtaggaaaactagatagaagcattctcagaaactactttgtaatgttatattcaactcacagagttgaacattcctgttgatagagtagttttgaaacactcttttcagagaatctgcaagtggatatttggatcgctttcaggccttcgttggaaacgagataagcttcacataaaaagtagacagaagcattctcagaaacttctttgtgaagtgtgcattcaactcaaagagttgaacttttcttttgatagagcagttttgaaacactctttttgtagaatctgcaagtggacatgtggaccgctttgatgcctgtggtggaaaaggaaatatcttcacatagaaactagacagaagcattcaccaaaagtttttgtgatgtgtgcattcaactcacagagttgaacctccctattgacagagcagttttgaaacactttttttgtagtatctgcaagtggatatttggacttgtttgaggcctttggtggaaatgggaataatttcacataaaaactagacagaagcattatcagaaacttcgttgtgatgtgtgcattcaactcacagaattgaaaaatccttttgaaagagaagttttgaaacggtctttttgtagaatctgccagtggatatttggaccgttttgaggcctacggtagaaaagaaaatatcttcatataaaaagtagacagaagcattctcagaaactactttgttctgtgtgcattcagctcacagagttgaacattacttttgacagagcagttttgaaacaatctttttatagaaactgcaagcggatattgggagcgatttgaggccttcgttggaaacgggaatagtttcagataaaaaggagacagaagcattctcagaaacttccttgtgatgtgtgcattcaattcacggagttgaacctttcttttgacagagcagttttgaaacacactttttttctagagtctgcaagtggatatttggagtgatttgaggcctatggtagaaaagcaagaatcttcttacaaaaaccaggcagaagcattctgagaaactgctttgtgatgtttgcattcaactcccagagttgaacattccttttgatagagcagttttgaaacaatctttttgcagaatctgcaagtggatatttggggtgcattgatgcctacggcggaaaagggaatatcttcccataaaaactagacagaagctttctcagaaactttgtgatgtgtgcattcaactaacagggtaaaaccttccttttgacaaagcagttttgaaacaatctttttgcagaatctgcaagtggatatttggggtgcattgatgcctacggcggaaaagggaatatcttcccataaaaactagacagaagctttctcggaaactttgtgatgtgtgcattcaactaacagggtaaaaccttccttttgacaaagcagttttgaaacactctatgtgtttcaagtagatatttggagcgatttgaggcctatggtagaaaaggaggaatcttcatataaaaactagacagaagcattctcagaaactgcttcgtgatgtgtgcattaaactcacacagttgaacattccttttgatacagcagttttgaaaccctctttttgtggaatctgcaagtgacagtttcaaagatttgagtccttcgttggaaacaggaatagcttcacataaaaagtagaaagaagcatctcagaaacttctttgtgatgtgtgcattgaactcacagagttgaaccttccttttgatagagcacttttgaaacactctttttgtagagtctgcaatttgatatatggagcgcattgaggactatggtaggaaaggaaatttcttcatataaaaattagacagaatcattctcagaaactacttggcgatgtttgcactcaactcacaaagttgaacattccttttgatagagcacttttgaaacactctttttgtggaaaaaggaagtggttatttggaaccctttaaggcataccgtggaaacgggaatatcatcatataaaaactacacagaagcattctcagagacttctttgtgatgtgtgcattcaaatcacagaattgaaccttccttttcatagaagagttttgaaacaaactttttgtataatctgctaatggatatttggagcgctttttggcctatggtagtaaagtaaatatctttatataaaaactagacagaagcattctgagaaagtcctttgtgatgtgtgcattcaacccacagagatgaacattccttttgaaagagctgttttgaaacactctttttttagaatctgctagtggatatttgggccgctttaaggctttggttggaaaagggaatagcttcacataaaaaggagacagaagcattctaggaaacttctttctgatgtgtgcattcaactcacagagttgaatattctttttgacagagcagttttgaaacactctctttgtagaatctgcaagtggacatttggagtgctctgaggcctgtggtggaaaaggaaatatcttgacatagaaactagacagaagcattctccaaaacttctttgtgatgtgtgcattcaactcacagagttgaaccttccttttgatagagcagttttgaaacactctttttgtagaatctgcaagtggatatttggactgctttgaggcctatggtagaaaggaaatatcttcatataaaaactaaagagaagcattctcaagaactaatgtgtaatgtttgcattcaactcacagagttgaacattccttttgatagaatcgttttgaaacactctttttctagaatcagctagtggatatgtggaccgccttgaggcctttgttggaaaccagattagcttcacataaaaagtagacagaagcattctcagaagctttttgtgatgtgtgcgttcaactcacagatttgaaccttgcttttgatagagcaggtttgaaacactctttttgtagaatctccaatggatatttggagtgctttgaggccttcgttggaaacggggatatcttcccttagaaactagacagaaacattctcagaaacttatttgtgatgtgtgcattcaactcacagagttggacctttttttgatagagcagttttgaaacgctgtttatgtagaatctgcaggtggatatttaaagagctttgaggtatgtggagggtaaggaaatatcttcacataaaaagcagacagaagcattctcagaaactcctttgtgatgtgtgcattcaactcacagagttgaacctttcttttcatagagcagttttgtaacactctttttttagaatctgcaagtggacatttggaggtctttgagggatttggtggaaaaggaaatatattcccatagaaactagacaacagcattgtcagaaaattatttgtgatgtatggattcaactcacagaattgaaccttccttttgatagagcagttttcaaacactctttttgtagaatcttaaagcggatatttggagcgctttgaggcctatggtagaaaaggaaatatcttcatattaaaactagacagaatcattctcagaaactactttggatgtttgcattcaactcacaaagttgaacattcctgttgatagagcagttttgaaacactttttttttagaatctggaagtggatatttggagcgctttgaggcctatgatggaaacgggaatatcgtcacataaaaactagacagaagcattctcaaaaactgttttgtgatgtttgcattcaactcagagagttgaaccttccttttgatagagcatttttgaaacaatcttttggtagaatctgcaagtagatatttagagtgctttgaagtctatggtagaaaaggatatatcttcatatataaactagacagaagcattctcagaaacttctttgttatgtgtgcattcaacttacagagttgaacatttcttttgatagagcacttttgaaacactctttttgtagaatctgcaagtggatatttggagcactttgaggcctgtggtagaagtggaaatatcttcacatagaaactagtcagaagcattctcagaaacttatttttgatgttcgcattcaactcacagagttgaatatcccttttcatagagcagttttgaaacactctttttgtagaatctgcaactggatatttggacagctttgacgcctcctgtggaaacgggaatatcttcacataaaaactagacagaagaattgtcagaaatttctttgtgacttgtgcaatcaactcacagagttgaaatttccttttattagagcagtgttgaaacactctttttgtagaatctgcaagtgaatatttggaacacattgaggcctttggaggaaaagggaatgtcttcacatcaaaagaagacagaagcattgtcagaaacaactctgtgatgtgtgtattcaactcgcagaggtgaaccttccttttgatagagcagttttgaaacactctttttgtagaatctgcaagtggatatttggagcgctttggggcctgtggtggaaaagtaagaaccttcatataaaagccagagagaaacaatctcagaaacaactttgtgatgtctgccttcaacccccagagttgaatattccttttgatagagcagttttgaaaaactctttttgcagaatctgcaagtggatatttggaccgcttagaggtcttcgttggaaacgggaatatcttcacagaaaaagtagacagaatcattctcagaaactcctttgtgatgtgtgcatttaactcacagagttaaccctttcttttggtagaacagttttgaaacactgtttttgtagaatcttcaagtggtcatttggcgcactttgaggcctgttgcttaaaaggaaatatcttcacatagaaactagagagaagcattctcagaatcttcattgtgatgtctgcactcaactcacagagatgaaccatccttttgatagagcacttttgaaacactctttttgtagaatctgcaagtggatatttggagggttttgaggcctgtggtggaaacggaaatatcttcaactagaaactatcaagaagcattctcagaaaattctttgtgatgtgtgcattcaactcacagagttgaacctttcttttgatagtgcagttttgaaacactcttttgttacaatgttcaagtgtatattttgtgcgctttgaggcctatggtggaaaaggaaatatcttcacataaaaactactcgaaagcagtctcagaaactactttgtgatgtgtgcattcaactcacagagttgaaccttactttttatagtgcagttttgaaacactgtttttacaatacctgcaagtggatatttggaccgccttgagaccttcgttggaaacaggaacatcttcacataaaaagtagacataagcattctcagaaacttctttctgatgtgtgcattcaagtcatagagttgaacctttcttttgatagagcagttttgaaacacttttgttgtggaatctgcaagtggacatttgtagcactttgaggcctgtggcagaaaaggaaatatcttcacatagaaactaggcagaagcattctcagaaaagtctttgtgatgtgtgcattcaactcacagacttgaacattccttttgatagagcagttttgaaacattcgttttgtaaaatctgcaagtggatatttggagccctttgagttcaacggtggaaacgggaatatcctaacataaaagctagaaagaagcattctaagaaacctctttgtgatgtgtgcattgaactcccagagttgaacctttcttttgatagagcagttttgaaacactctttttgtagaatctagaagtggatatttggagtgctttgaggcctattttagagaaggacatatctaaatatgaaaactacacagaagcattctcagaaactactttgtgatgtttacattcaactcacagagttgaagattccttttgatagagcagttatgaaacattctttttgtagaatctgcaagtggatatttggagctctttgaggtcttcggaggaaacgggaatatcttctcataaaaatagacagaagtattctcagaaacttctttgtgatatgtgcttacaactcacacagttgaaccttctttttgatagggcagttttgaagcactctttttgtaaaatctggaatttgatatttggagcgctttgaggcctccgttggaaatggaaatatcttcacatataaactagacagaatcattcacacaaacttgtttgtgatgtgtgcattcatcccacagcgttgaaccttccttttgagagagcaatttgaaacactctttttgtagaatatgcaagtttgtatttgtagcgctttgaggcccatggtagaaaagcatgaatcttcatataaaaaccagacagaagcattctcagaaactactttgtgatatttgcattcaactcacagagttgaacattccttttgatagagcaggtttgaaacactgtttttgcagaatctgcaagtggacattttgtcctctttgagtcctttgttggaaacgggaatattttcacataaaaagtagacagaaacattctcagaaacttcgttgtcttgtgtgcattcaactcacagagttgaacttttcttttaaagagcagttttgaaacactctttttgtagaatctgtaagtggacatttggagcactttcaggcctgtggaggaaaaggaaatctcttcacatagaaactagacagaagcattctcagaaaattctttgtgatatgtgcattcaactcagagagttgaaccttccttttggtagaacagttttgaaacgctctttttctagaatctgcaagtggaaattcggagtgctttgagcctatggtagaaaaggaaatatcttcataaaaaaacttgacaaaagcattctcagaaactactttgtgatgtttgcattcaactcacagagttgagcattcctttggatagagtaattttgaaactatctttttgtagaatctggaagtggatatttggagcgctttgaggcctaccgtggaaaagggataatcttcacataaaaactacacagaagcattctgagaaacttctatgtgatgtgtccattcaactcacagggttgaaccttccttttgatacagcagttttgaaacactctttttgtagaatctgcaagtggatatttggaccgatttgaggcctaaggttgaaaaatgatatatcttcatacagaaactagacagaagcattctcagaaactactttgggatgtgtgcattcaactcacagagttgaaccttccttttgatagagcagttttgaaacgctctttttgtaggatctgcaaatggacatttggatcactttgaggcctgttgtgtaaaaggatatatcttcacgtagaaactagacagaggcattctcagaaacttgtttgtgatgtgtgcattcaactcacagagttgaacattccttttgatatatcagttttgaaacactctttttgtagaatccaccattggatattttgaccgctttgaggccttccttggaaacggtaatttcttcacataaaaagaagacagaagaattctcagaaacgtttttgtgatgtgtgcattcaactcacagacttaaacctttctttcgctagagcagttttgatacggtctttttttagaatccggtagtggacgttagtagcgttgtgaggcctgtcgtggaaaaggaaatatcttcacatagaaactagacagaagcattctcagaaacttctttgtgatgtgtgcattcaactcagaaagataaaccttcattttgatagagcaattttgaaaccctccttttgtagaatgtgcaagtggagatttggagcgctttgaggcctatggtcaaaaaggaaatatcttcatataaaaactagaaagaagcattctcagaaactactttgtgatttttgcattcaacacacagagttgaacatttcttttgatagagcagttttacaacactctttttgtagaatctggaagtggatttttagagcgctttgaggccaatggtagaaaaggatatatattcatataaaaactagacagaagcattgttagaaactgctttgtgatgtgtgcactcaactcaaagagttgaacctttcttttggtagagtagtttggaaacactctttttgtataatctgcaagtggatatttggaccgctttgaggtcttcactggaaacgggtatattttcacataaacactagacagaagcattctcaaaaacttctttgtgatgtgtacattcaactcacagagttgaacctttcttttgatagagtagttttgaaacactcttttgaagaatatgaaagtggatatttcgagcgctttgagtcctgtgttggaaaaggaagtatcttcacatagaaactggacagaagcattctcagaaacttctttgtgatgtgtgcattcaactcactgagttaaaattttcttctcattgagcagttttgaatctttctttttgtacaatttgcaaggggatatttggagccctttgcggcctctggtggaaaggatatatcttcaaagaaaaagtacacagaaacattctgagaaactgctctgtgatgtgtgcattcatctcacaggtttgaacctatcttaggattgtgcatttttgaaacactctttttgtataatctgtaagtggatatttggagaactttgaagcccaccacggtaaagcagatatcgtcacgtaaaaagtacacagaagcattgtgtgaaactactttgagatgtgtggatacatctcacagggttgaacctatcttatgattgagcagttttgaaacactctttttttagaatctgtaagtggactttaggagtgctttgaggccctctgtggaaaagcaaatatctttagataaaaactatgcagaagcattctgagaaacttctttgtgatgtgtgccatcatctcacagggttcaacctttgttttgattgagcagttttgaaacaccctctttgtagaatctccaagtggatatttggagtcctttgaggcctattgtggaaaaggaaccatcctcacataaaaactacacagcagcattctgagaaacttctttgtgaggtatgcattcaactcacagagttgaaattttcttgtcattgaacagttttgaatctctcttttagtagaatctacaagtggatgtttggagagtttcgagtcctattgtggaaaaggcaatatcttcacataaaaactacacagaagcattatgagaaacttcttcgtgatgcgtgcattcaactcaaagagttgaacatatcttttgattgagcagttttgaatccctctttttgtggaatctgaatgtggatgtttggagccctttgaggcctactgtggaaaagcaaatgtcttcacataaaaactacacagaagcattcagagaaacttttttgtgatgtgtgaattcaactcacagaattgaacctatcttttgattgagcagttttgattctctctttttttagaatctgcaagtggatattttgtgcgctgtgaggcctactgtttaaaatcaaatatgttcacataaaaactacacagaagcattctgagaatcttctttgtgatgtgtgcattcaactcacagagttgaacctatcttttgattgagcagtttcgaatctctctttttgcagaatctgcaagtggatgtttggagagcttttttgcctattgaggaaaagaaaatatcttcacataaaaactacatggaagcattttgagaaacttctttgttaggtatgcattcaactcacagagttgaacctatcttttgattgagcagcttagaatctctctttttgtagaatctgcaagtggatatttagatccctctgtgccctatggtggaaaaggaaacatcttcaaataaaaactgcacagaagcattctcagaaacttcttcgtgatgtgtgcattcaactcacagagttgaacatatctttttattgagcagctttgaatctctctttttgtagaatctgcaaatggatattgggagcactctgaggcctactgtggaatatcaagcatgttcacataaaaactacacagaatcattctgagaaacttctttgtgatgtgtgcattcaactcacagacttgaacctatcttttgattgagcagtttagaatctctctttttgttgaatctgcaagtggatgttgggagccctttgcgccctagggtggaaaaggaaatatcttcaaataaaaactacacagaagcattctcagaaacttcttcgtgatgtgtgcattcaactcacagagttgaacctatcttttgattgagcagttttgaatctctattttgcagaatctgcaagtgaatgtttggagagctttgaggcctattgtggaagagcaaaaatcttcaccttaaaacttcacagaagcattctgagaagcttcattgtgagctgggccttcaactcacagagttgaatttatcttctcattgagcagttttgaaactctctttttgtagaatcttcaagtggatatttggagccctttgcgccccatggtggaataggaaatatcttcaaataaaaactgcacagaagcatcctcagaaacttttttgagaggtgtgccttcaactcacagagtcgaacttatcttctcattgagcagttttgaatctctttttttgtagaatccacaagaggatatttggagccctttgcacactatggtggaaaaggaaatatcttcaaataaagactatacagaagctttcagaggaacttatttgtgatgtatgcattcaactcacagagttgaacttttcctttgattgagcagttttggatctctctttttgtagaatctgcaagtggatatttggaacattgtgaggcctactcttaaaatcaaatattttcacataaaatctacacagaagcattctgagaaactcctctgtgatgtgtaaattcaactcacagagttgaacctatcttttcattgagcagtgtagaatctctctttttgcagaatctgccagtggatatttggagccctttgaggactaccgtggaagagcaagtatcttcacataaaaactacacagaagcattctgagaaacttctttgggatgtgtgcattcaactcacagagctgaaattatcttttgattgagcagtttggaatctctctttttgcagaatctgcaagtggatatttggagccccttgtggcctattgtggaaaaggaaatatcttcaaataaaaactacatagaaacattctgaaaaacttatttgtgatgtgtgcattcatctcacagggtagaacctatcttatgattgagcagttttgaaacactctttttctagaatctgcaagtggatatttggagcgccttgaggcataccgtggaaaagcatatttcttcaggtaaaaactacacagaagaattctgagaaacttctttgtgcagtgtgcattcatctcacagagttgaacctctcttttgattgagcagtcttgaaacactctttttgtagaatctgcaagtggatatttggagccctttgagtcctacggtggaaaaggaaatatcttcacattaaaaactactcggaagcattctgagaaacttctttgtgatgtatgcattcaactcacagagttgaacctatcttttgattgagcagttttgaatctctctttttgcagaatgtgcaggtgcacatttggagccctttgcagcctgtggtggaaaaggaaatatcttcaaatataaactacacagaaacattctgagaaactcctttgtgatgtgtgcattcatctcacagggttgaacttatcttatgattgcacagttttgcaacactctttttttagaatctgcaagtggatatttggagcgctttgaggaacaccatggaaaagcaaatatattcagataaaaactacagagaagcattctgagaaacttctttatgatgtgtgcattcatcacacagtgttgaacctttcttttgattgattagttttgaaacactctttgtagaatctgcaagtggatatttggagccctttgaggcctattgtggaaaaggaaatatcttcacataaaaactactcagaagcattctgagaaacttctttggaggtgtgcattcaacccaaaaagttgaacttatcttctcattgagcagttttgaatctctctttttgcagaagctgcaggtggataattggagccctttggtgcctactgtggaaaagcaaatatcttcacataataactatacagaagtattctgagaaacttctttgtgatgtgcattcaactcacagagttgaacctatcttttgatcgagcagtttcgaatctctctttttgcagaatctgcaagtgggtgtttggagagctttgttgcctattgtggaaaaggaaatatcttcacataaaaactacacagaagcattctgagaaacttctttgttaagtgtgcattcaactcacagagttgaacttgtcttctcattgagcagttttgagtctctctttttgtagaatctgcaagtggacatttggagccctttgcgccctatggtggaaaaggaaatatcttcaaataaaaactacacagaagcattcagagaaacttctttgtgatgtatgcattcaactcacggagctgaacctatcttttgattgagcggttctgaatctctctttctgcagaatctgcaggtggatatcaggagccctttgaggcctactgtggaaaagcaaatatcttcacataaaaactacacagaagcattctgagaaacttctctgggatgtgtgcattcaagtcagagagttgaacctatcttttgattgagcagttttgaatctctctttttgcagaatctgcaagtggatatttggagccctttgtggcctatggtggaaaaggaaatatcttcaattaaaaactacacagaaacattctgagaaacttctttgtgatgtgtgcatccatctcacacggttgaacctatcttatgattgcgcagttttgcagcactctttttgtaggatctgcaagtgtatatttggagctctttgaggcctaccgtggaaaaggaaatatcgccagacacaaactacacagaagcattctgagaaacttctttgtgatgtgtgcattcgtctcacaaagtagaacttttcttttcattgagcagttttgaagccctctttttgtagaatctgcatgtggatatttggagccctttgaggtctattttggaaaaggaaatatcttcacataaaaactactcagaagcattctgagaaatgcctttgtgatgtgtgcatccatctcacagagttgaacttttcttttgattgagcagtcttgaaacaatctttttgtagaatttgcaagtggatatttagagaactttgcatcctgtagtggaaaacaaaatatcttgaaagaaaaactatacagaaggattatcagaaacttcttcatgatgtgtgcattcaactcacagaattgaacctatctttgattgagcagtttggaatctctatttttgtagaatctgcaagtggatatttggagcactgtgaggcctactgtgcaaaatcaaatatgttcacataaaaactacacagaagcattctgagaaactcctttgtgatgtgtgcattcaactgatagagttgaacctatcttttgattgagcagttttgaatctctctttttgtagaatcagcaagtggatgtttggagggctttgagacctattgtggaaaaggaaatatcttcacataaaaactacacagaagcattctgagaaacttctttgtgaggtgtgcattcaattcacagagttgaacttttcttctcattgagcaggtttgaatctctcttttggtagaatttgcaagtggatatttggggccttttgcggcctatggtggaaaaggaaatatcttcaaataaaaactacactgaataatacagagaaacttctttgtgatgtatgcattcaactctcagagttgcatctttcttttgattgagtagttttgaatctctctttttgcagaatctgcaagtgtatatttggagcgctttcaggcctgtagaaaagcaaatgtcttcagataacaattacacagaagcattctgagaaaattctttgtgatgtgtgcattcatctcacagagttgaaacattcttttgattgagcagttttgaaactctctttttgtagaatctgcaagtggacatttggagcgatttcaggagttcctggcatagagattgtcacaaagatatgttttcaatagtggtgctatccctagggcagagaagatccagagaaagcccaagtggctgctggaacaaagtcagacaccgtgccacctgtccacactccttggctctgccatcatgctgaagattggtttaaagggctggcttccctccccgcaaaattaaaagagcacagactgagaaactgaatgtgggagacagcagtggattttgctgttctcaggggtcacctcacgtttggaagcattctttcaaattaacccatctcaggccatctgcagagaagaaaagttgtacctaactttttttcttgtcagcacttggtaggggtgttttattgaccaaatgtgttcccacaacctggttttttgtaactaactaaatatagtagatttttaaattttatcatcaaaatctatagacttttttaattaaaataggctccacatctatgtcctgcttttctacttattaattacattgctgtataaaagaacaagacttcagaatcaagaatatcttgtctcttggcattgaatttatacaaggtgctctttcttcaatgctgtctcaaaggacatatttttactcattaaaaaggaagatcggaatctagttgtatgcactgctccaacatactaataattaaaattaggaggtaaatgtggtcaaagctatagaaagacttgagatgtcatttatattgattactgtatagcactctacaaacagaaattgggaaataatagtttatataaatattttgtagcatttcaaatatttgagtgcctgaaatttcacctcttatatagttcagattatcaatttgaagacttactccgctggttaaaatgtttttagtctcgtttgagtattatataaaagcaattttcagttaaatgtgttccgcttacataaaacattagaaattagtgagtatttaattacattttcgtgttcctgtaatgcctttagaagattttcatattattacctatcaatatatgtatgctttgtctaagaaaaataaatcatatacatcattgaaattgaaactttttaaaagtacttattaattctattgaaaaaccacatccataggagcaattacaatataatattgtgaacatgtaaatatatatcctatgtctattttatatataagcatatgtgattaaaaatatagttaagaatttttaaacctagtattataaagtaaaaattagttaaacttctgatgattatttgttaattaagataaaattattttgatttgggtggttttaaatgaacaaaaatattaaattacatgacaaaaattctttataaaatgtttacgatttttacattagttttatcactttattccactattttattttaagatgacctgccttgtttaaaacactgtattcatcttaattaaattaaattccatttgtaaaaaaattaacaaatgatttgctctattatacagtgcggttataaactgagtcagtatctcaagatttgatccccattatcgtcatccatggccctatttgtttgataaatgtagtgtctttttccatgcctgtcacatctctattgctcatttatttttctccttgtcccttatagggagcattgcctatctctagattaagcaaaagttgcatcttaaaaaagcacaataacctgctcaatctttctaacacagagaaatgtttgttaagtaattaaattgtagatgatgatacaaagagcttgattaaataagatgccaaagtacccttgtgattcagaatatgaatggtatttaatgcctttgaaatcaataattgctgagtgacattaattaatgccaatatttcagaagttgttctggttagtgaaatgtgtacaacatgtaaaaatttccgaactctgaagggcaacattattctataattaagaattaagaattaattcacattaattattggggagaaataattttaagaattaatgactgagaaaacatttttattttttatttagaaaattattttgtgcatgagcattactgcaagttttgcaagaaacataaatttatagaaacaattatgtgcacaagatgaatttaataacatcttgatattttccactaatacagttgtatttggtaaatctttaaatgcccgtcatctaaagatcataaatgaatcttggaaaccttgtaggtaagggtaaatataaggatgcatccaattacatttacacacacatacaattacatttacacaaacatacatgcacacacgctcactgatacaggtatgcatatatatacatgaatttaccaactgattttaactaatatttataagagcctgtaggattgatatatattgttgaacctgaaaaatatttattatatacatgtttaaaatacacaaagaaataaatagtaatagcactaggcatttgaaactgtacttaaatataagctgtgatcattacaaattcttacactgaataaatatttttatttttatactaatatgtttgatacatgtgtacattttctaaaatgtattatttttgtcatagagtcatgtcatgtataataatatttcagtcaaagatggattacatatacaaaagtggtcccatgagattataatacatatttttacatacttttctatgtttaagtatgtttacatacataaactcttaccactgtgttcttattgcctgcagtattcagtatagtaatgtagaacacaggtttgtagcctaggagagagaggttataccatataacctaaacgtcgtaggctgtacaaactaggtgtttgtaatattctctctgacgtttgcaaaatgatgaaattgcctatggatgcatctgttagaacgtatccctgtcattcagtgatgggtgactgtgctaaaatgctaaacctaagtttcaatgacctccataaaattgttgtactgtgaaatacaaatctctcacctacggccacaatatgtttgcaaactaagcagatcatgggaaggagaatgtgctggcatcgctgggatgattttctcacactatatgaataatatctccagactttgcgaatatgagccacttgcatagagttaaagtaagcatctctttgctgggaaatttatcaaatgggagtatgaagtgtttttaaaagatacttgcttgtttgtagacggtaggcctacagtggctcatggcaatggttgaggttgctaagatttggaggaaggaggcaaaatgaaatggccacttatatggtatatggatcacttgtttctgttgagttacagattcagctggctatttctcccaatgttagttatttggagaaaaaaacatgatggtaatttttgggtaacaaatacaatatttgatgaaagcaaatttattgagggttagacaaactacatgataatttaggctgcaatgtcaacacgagacttctggcccaaattgtgcagagtttgggtccagctgcaaagttcaaaggaagaggccatgtaagatgattcgcacttttgtcaccaactgccagttcagaactgactcacagaactcattgaatgccattgtactcatggtttataatagagaaagggtagaaattaggaccaatcaaaggaagagacatatcacgtaaggtggaatctaggaggactttgaatgttgtttctattgtcttcaggacatattacctgtcattgttgtacagcaataaacatggagtactaccaacctggggagctcannnnnnnnnnnnnnnnnnnnnnnnnnnnnnnnnnnnnnnnnnnnnnnnnnnnnnnnnnnnnnnnnnnnnnnnnnnnnnnnnnnnnnnnnnnnnnnnnnnnnnnnnnnnnnnnnnnnnnnnnnnnnnnnnnnnnnnnnnnnnnnnnnnnnnnnnnnnnnnnnnnnnnnnnnnnnnnnnnnnnnnnnnnnnnnnnnnnnnnnnnnnnnnnnnnnnnnnnnnnnnnnnnnnnnnnnnnnnnnnnnnnnnnnnnnnnnnnnnnnnnnnnnnnnnnnnnnnnnnnnnnnnnnnnnnnnnnnnnnnnnnnnnnnnnnnnnnnnnnnnnnnnnnnnnnnnnnnnnnnnnnnnnnnnnnnnnnnnnnnnnnnnnnnnnnnnnnnnnnnnnnnnnnnnnnnnnnnnnnnnnnnnnnnnnnnnnnnnnnnnnnnnnnnnnnnnnnnnnnnnnnnnnnnnnnnnnnnnnnnnnnnnnnnnnnnnnnnnnnnnnnnnnnnnnnnnnnnnnnnnnnnnnnnnnnnnnnnnnnnnnnnnnnnnnnnnnnnnnnnnnnnnnnnnnnnnnnnnnnnnnnnnnnnnnnnnnnnnnnnnnnnnnnnnnnnnnnnnnnnnnnnnnnnnnnnnnnnnnnnnnnnnnnnnnnnnnnnnnnnnnnnnnnnnnnnnnnnnnnnnnnnnnnnnnnnnnnnnnnnnnnnnnnnnnnnnnnnnnnnnnnnnnnnnnnnnnnnnnnnnnnnnnnnnnnnnnnnnnnnnnnnnnnnnnnnnnnnnnnnnnnnnnnnnnnnnnnnnnnnnnnnnnnnnnnnnnnnnnnnnnnnnnnnnnnnnnnnnnnnnnnnnnnnnnnnnnnnnnnnnnnnnnnnnnnnnnnnnnnnnnnnnnnnnnnnnnnnnnnnnnnnnnnnnnnnnnnnnnnnnnnnnnnnnnnnnnnnnnnnnnnnnnnnnnnnnnnnnnnnnnnnnnnnnnnnnnnnatagtcttgataaaagaaaacatattaggataattcacacccccgtgctccaaaccttacggcaaagcatcagtaatcaagacaacaaaatactgatgaaggaaaaatatatagattgatggaagagaattgagagtccatatataaaactatgtatctatagtcaatggattcttaaagtggtgccatgtgcaattcaatgaggaagagacagtctttgaacaaactgggtcaacaacgtacacgtggatcgccacttgcaaaatagtaaattggaacccttaccccaaagcatacaaaaatattaactcaaacgaattaaagacatacatgcaagagctagaataaagtatatgggaaaatcttcaggattttggatctagcaaagaaatagctgtaacaccaaaaacatgagcaacaaaataaaaattagatatttaaaatttcttaaaaattaaagacattggtgattcaaaggacaaccaaccatgtcaaaaggcagctcaaaaattgtgagaaaatatttgaaaaacacatatctatatatctgcatatatatgtatcttgaatatagaaaaattgttttaactcattaacaaaaatcccaactcaaaactgataaatgataggaatagatgtgtatcccaagaagatgcacgaacggtcaataatcccataaaaagatactcaacagcatcactcatcaggcaactacaaatcaaaaccacagttagatactctatggctagaactggccactttggaaaataagttgatggcttctaaatatattaaacatagaattgtcatatgacccagaaatttattcccaggtataccaccagagtattggaaagagatgttcaaacacaaattgtacacaagtattttaacagcagtatttaaaatagccaaaggctgaacacaactcaaatgtcaataaaaatattattggataaacaaaatgttatatccatgaaattgaatgttatacagttataaaaagaaataaagtaccaatacgcatatgaaccttgatagcattatgccaactgaaagaagccaggcacaaaaggccacctattgtatgattctatttagatgaaaatataataggaaaatctacagagacagaaaacagatttgtggttgcttagaattgagtaggggatgagtgcataggaggttaacagctagagaaggtggggtttctttttgaagtgatgaaaatgctctaatattcattgtgatgatggctccacttatctgtgtatatactaaaagccattgacttgtagacattaatatgtgcactctacagtatgtaaattatatctcaataaatcctttcaaaaatacacagaagactaagggattttggactgttgcagctgggaggcagtttgaaatactgaatcggtctcatcgagaatgtgaggtttcagtaaagacttgaggaagttgaatgagctgatcaatggatatatggagggttatctttccaagccaagaaattaactagagtcttggtcataagacagcagcatgtttgcatgtccagaggacagtgaggtggtcaggaccactggtaagatcaagggtgaagacataaaagaattttggcggttaacatgtggcagatcatgatgggcttgcagaccattgtacgaattgtgtcttttagtgtaaatgaaatggggagacaaatcattaccccattatcaatattttaataaattggatccatgaaccaaatacaatgagattaaatcaattagtaataatatgcaaatttgtattaaaattacaagaattccttgcacatttgagaacaggagagtcatgattgtttatcagcaataataaactattaattttaattgtaatcagctaattgagattattgcaatacatcattctttataatgtgactgtcaaaaggaaaatgtgattgtaatcttatactacatctatcaatgtctttgattcataggactatagaataagcccctagttttcaaagccaactgatgaggcagcgacatcttatgcaagtttgctgctttctgccacagtgatccttggtcagctggcacaaattgttttacaaacaccactaggtctaaaaatgtttggatcacaatgaacacagaaacaccttcatcccttcagaaagacctatcaattattccaatacagaatgaaaaattgacaacggaagtatgttgattgtaaaaatgccagatagcttgcatctacatgaaagaaaaatgccatttttattacaatagatcattgttttacatgagttttggtatagcacaatgttgaaccaagggcaaagaaagatgagttaatgaagtcttaagatatcaagaatttgaaagaaaaggaaggtcatctttcaaggttagtgacatagcattcatcttctgttgtcaccttttctgtcattccctgtatgcctgatggacagctttcactcaagttcagagtacagcatgcaaagattagctaccaactaatttttatgaagtgagcttaatttctagccagactgagcttatgttttagcaggaagcatttttgggaaatgtttatattagagttttcccttcttgacaaggtgagacataaatgtctactttatagacatgaattaagatgtgaagatatttgggagaaacattttctcaaatgctaaataacaaaggtacacaaaggggaaattatactagatttatttcccacttgttttctatgtctcatccaattcaccttgattctcttcagtttctgtttaatgtagaaagtggcattttcattattttaagcttctagcacaatgaaagaatttctctttttcatgaactgcatcataaatgaaagggaggaagagtgtccaataccatatttattgttcaacaaaacactgctccacggcttaaattcagtttaaaaaagataatttattgaatatctaacacatacataaaaggcagtaaagacaaatgagaagagggcaggatattgaagtatacagattttaatgctgagttttgtttcttagtaagttactgcaccttacagagactcaatatcccctgatttaagaaggcgatgctaatgggtattgcataggtgtaagtataaaaatgttgtatttaagagaatcccacaagcttggtataaggcagaaaataaatagatgtgacattaatgagtagtttgttacatttgtatgctacctgcagactagaggaagcaagaaacacagccactatgcttgattagcattatattctaatttgggatataaatagaaaagagaaaaatagaaagctatgcataaacacatgcattaaaatgaattttatgtggactctttcaggaaaatgttcctaagttattttttttttattgtggtaaaatacacataacataaaaagtactctgttaaccattttaagtgtacagttcagtggtattaaatagagtcataacattgtgcagccatccctaccatccatctccataactcgtttcatcttgtgaaactgaaactctatacccattaaacagtacttccccatgtcttcctccccccagcttctggcaatcatcattgtactatctatatgattctgtccactttaagtctcttatacaaatggaattatactgtatttgtccttcactgactaacttatttcacttggcataatatcctcaagtttcatccaagttgcaacatatgtcagaatatttccctcatgtttaaggctgaataatattccattgtatgtatacatcatgttttgcttatccattcatctgttgttggacacttcaattgcttctacgttttagctactgcaaataatgctgctgcaaacatggatgtgcaaatattttttcaagactctgctttcaattcttttgctatcttgagatgtggggctgccgaatcataaggcaataccattttgatgttttgaggaactaccatactcttttccacagcaaacatagggtttggcatcccctccaatattgcaaaaggaattgccacatccttgcctgtggattttattcacaagtcctgtggctctctctacatcccggccaccatgtgttatttcctgtttatatatatgacatcaaaggtgcaggaagtaatgaactaaattggaaggataaacacgtagaaaaatcgaggtaaatactgactacataaaaccataagaataagaattttggatgatctatctattatatatctatttatctaacatctatctgttcctccatctgtaattaaaatatattagttagagaacagaggaaaaagtaggaatacatgaatttaaattttaattcttcttagattgtctcacagcatcattatatgacagaaaatttataggtcagtatctgttaactataaatgttacatttttaaactattcaaatatattgaattacagcatgaataatatattacaatccattcaagtttatttttttccaggaacacaaaaatacaaatttcatttgcaattcaagaaaaacagaaatggatacatatgattgatgtatatacacatttaatgtatttttaaatatacatttttaaaaaataaaatgtttccaggacataaaattttctagaaataaaattttctaggacaactacttaaaatatcactgaaaatagtgtaataccaaataactctggtattacataagaaaacaaaattaaaatttcagataagcttagaaactaaaaattttaaaaatattattctgttctccatatgttcatatttaattttatttcttttcatttttcttcagtgttgctctactaaaatataacatacaatagttacttttgatttctgttcttattactcaaaactgtatacattttctcatgctcttaatttagctatgctacttttctttactcttggaattttctcattcgtgttcactctcttttgagttcccatagtatcaaataagcttttttccctctttctaatttgaaggttcatcttctcataattattttgtccactcagtttcttttcattctcagttaagtgcctctcatctggcttcttttcatttgtaaggtttcctttcatctcaagccagtcttttatttatattttgattctgttttctggaggacatgcttccctgaattttaaggaagaggccaaaaggtttgttcaagtttttacctgatacattggattaaattatctaatgtacacactcttaatttaagtctaggggcgactgtctactcttgattttgtatagtattatttttcttaacatccaagtccatcttcatctatttgtatatgatcaataaaaatatatttgtccagaaccctgctttggtggagttacttctttctaagtaggagaggtagcagttgagacatgagctgggttctgggtcagtttagagggctgggcgacattcctccttttggtctgtatgactgaatgaatgaggttcttgctgtctcgctcctctccttaacacattgagccattgcagcagatgagaaggaataatcctgatctgccattcaggtggaacacttgttctctccaaacacatccataggttgtactcacattcggccagaatgtatcctgtcaatgatatggagatgtatctagctatctagatagatatctactttggtttatgctctctgattgtccgtaaattatctccttaaagtgaatatcaaaagagagcttggtgatggcagtgttataaaatcctcaaaatgcagcacccacacccagaggaatttgtagtttctgggattctaattcagataccaaactatataaaaggggcattggtcattgagggttgctaggctcttttttgagcataattgttctttccaagactttgaaattattttaaaagtctaaccttttcctcggtatgctgcaagatgatttgattttaatgcacaagcactaattctcccctaagatttgtacaatatatttgctttgacaagccatagccagcaactcacttcacagcaatttatagcatttccacaacaagttgaattatttttaactagactctctttgccttaataaaaatatgaagaagcaatctacttgttctaattaggttcaaaagttgacagtctctctcctggaaagaataataaaacttttcaacggcctaatatgcatctatagacacacacacacacacacacgcaggcactgttcataaaacttaaagcacattctgttctatgaattcctttgtctagcacaaaataaaacgatctcagtatatgtcaagtaccaattttttcgtatggccaattataggtattttattttttaaagattagagtgttcttgaagctctttctatttctttgtcaatgaactaaacattgacagatatgtaggttttcccacataagaacattattaacatcaaaatagaaagctggcggtagaaataatgattgggaacacagagtccctactcagcgttctacttctgccataccataactttgtgatctcacgaaatatcactccatgttgtcatccctatgtatagttctgtcatttttcaataagagctttttgcttaattatgaagtactagttactataaccattattttgagcttcatgtaaatcaagaacacatggactccacttgcaaaacattgaaaatgtagttagggattggggacacaaagcaacattttaaaatgtgtaaagacaatgagtaagcaacaaagtgtccaattttttaggcgaaagttgcatacgtcaggaaaaagcaggattaagtaacagagaatttgaatgataactggccattggtgtcgtttacaattgcaagtcataaaaatgaagtttgcttttttaaagagaaaaggagttagttagaatgggtcaacctattggggaagcaatgtagttagagacaatgcccaaaaccatgtgagcaaatgctctgtagagcgcacccctgcaatgctgccattgtgaggccaactctctccttgtcttggtactgagccctccattctgcctccatcattgccactgtagctgccacaaaatgatccctcaaccaccgctgcccaggaacaaagaaagaattctgtccttccgtgctctcagatcaatttccaacatcaggtgagactttgatgggcactattcagttcccatatccctgaaatagatgcagtaaaaacatagaaattgcctatgtgtttcccaataagacacatatggaagcctgttttcccacaacaggaaggggtttccacgacgggtgttcaaaggaacaatagtccctgtaaaccatactttgcccatatgaagaaaagcaataaggattatttagtaaatagacatggaaactcatccagggttggctgatgagaagctttttagcaagggggtctgccttcagttaggacaaggtctgtgcttcccgcgggttctctccacagcaggagggatgcaagcttccctttcctcccctgcacctaccctcaaatggcctagaggtcttcaggtgctagaatttctcaattaatgctgcacaaaataacagacagccttgacagtcacagtctgttctcatgaagctagtctctgcttactacataaaagagaagagtaagaacaatggtggtaaacactaccctagctcaaaaaagtttctctctgtaggatgccaagaacctgggaaccagtacatctgctgctttcccttctcggattctagcccagacaaaagaggcaaggggcatttcttcagaggtcttgagcttcactacacaatgccccaggcactacatgcaccctctttatatatttctaccttgaaaacaattttatataatattaataatatatatttttatataaggaacacatatgtttattttatagatagatatagattttcatagataaagatctctagtctgccttttttaaggctgggctgatcgcggtgcctcaaaactataatcccagcactttgggaggccaaggtggccagatctcttgagtccaggagatggagatcagccagggcaacatggtgaaaccccatctttacaaaaattagctagcatggtgtcatgtacttgcagtccctgctactcaggagactgaggtgaaagaatcgcttgagcacagtatgtgaaggcttcagtgaggtctgatcacatgactgcactccatcttgggtgacaaagtgagaccctgtctcaaaataaaataaaataaaaaggctaccaccatactcacagataagtgtgtcaggtatatttgcagctatctttcctatattctattaggtaaaaaaaaaattgcaaagaactcttctcattctagatttttgttttaattagacatttgaagtttatagcagaagagctataatcatgttttgtgtgtgtactctatagaccagatagtgcaaacatatatcaatgctttctaaaagtatataaggttattagaaatattttaaactacctataggtatatatgtatctaattgaactatcaaatgcaagtaagatcatttccttagcgtgtgaaatgcactcaatttattaaaatattttctaatgtctattacaataatatttcttaattagctaacataagaggagttttaagacatttatttatatgtacttactagattcaaactcgattccactattttcagaaatcatgctccgagacaagtcctttttttaatccatgtttcttcctgtattaaaagacagatatgtcaattttgctaatcatactgttccaaacctctccatcttatttttccgtttgttctaccagtcattcagagacttacttatattcaaatttctctctagttttaacatttgtgtatgtcttcttgtgtttttgtctatttttgctgtatataatttaagacatttattgacatatatcatacatgcagaaaagtacaatgattaaatatggatagcttcattaatgaaacacatgtatttgcttagaaccatgtatgaaaatagaacattactaaaaatagagatacttctcctgcccctttccaaacactaaccctcatcctcaatagtaacagattttttttatcatacagtaatttggtctattttcaaatttttattaaataaatcagagtatctactccaagtctatgtttctttcattgttgttatttttcttatagtatttatctgctaatggacatggtagattaaagacggctacatacacattttttaattaatagattttttgagcactttgtggctcatgcctctaatcccaccactttgggaggctgaggtgcgtggatcatgaggtcaggagatcgagaccatcctggccaacgtggtaaaaccccttctctactaaaatacaaaaaattagctgatagataacatcaagataacatctttgttcttagctgcactgagtcaagcctacttacatctttgtttgtcttcctctgcacttttccttccacatcacactccaggaatgtcaagctgtgctgccttctaccccatttccactatttcgcccccgccgacgcggctttttgccgccatggatttttgaccacgccgctgcgggtttttgccgctttatgcctccgccgccgcgactttttgcccccgccgcctttgctttctgcccccaaggctgcgactttttacggctttttgcccccgtcaccgcagctttttgcccccgccgccgccgcagctttttgtcgccgcggctgtttgcctccgccacagtggcttgttgcccccgccgccgtggcttgttgcccccgtcgccccggctttttcccccactgccccggctttttaactctaccgttgcggctttttgcgcccgccaccgcggctttttgcggttttttgcccccgccgcggctgttttcccccgccctcgcggctttttgcccccatcaccgcggctttttccccgcggccgtggctttttgccgacgcggctttttactcccgccgccgcaggtttttaccgctgcggctttttcaccccgccgtcgcgggttattgcccccatcgccgtggctttttgcccccaccgccgcgggtctgagggcgggatcggcagactcggctgccaggtctaccagagtcctggctagggcaccgcggagggtaacacctggtccagctctcccggttcgggggttccttgcctagacaccagcgccccaagctctgctcctgggccgctgcagcctgcatagagcggcgctgcgctcggccccgatgggagagaagaaggagagcggtggctggggtgacgcggctatcgcagagggaggctcacgggccgcggccagccaggtgctgcagcagtgcgggcagctccagaagctcatcagcatctctgttggcagcctgcgcgggctgcgcaccatgtgcgctgtgtccaaggacctcacccagcaggagatacggaccatggaggtaagggggtcagggacaagggctgggctcccgcaccggactggacatctccctcggggccccagttcactcctggccgagttgcgtccttgagcccgcgtcgcctccctggaggcttctcctccatcctgcactcgctgatgcggcagccagaggacccgggaccagccctcaccttgggcaggatttgtggggcgggtgcgtgttgggaactgtgatggaggctcgaggggcccgtgggcggggtgggctgtgcgcataaggggatgcccttatgccccgaatttccatctcgtgcagcgttctcatcttgtaggtgaggaaaccgaaggcctgagggagaaatgacttgccaggaacccctgttaaggaaaattaacaaagtgtggttattaaagaagaactgagttcggattcagacctggagtcccacatccttggttaagacattataccactttgagtctggcctgttaactgaggttgagccactccatcctcgtcttattgtggggtcctgacctcaaggggtttcctgcaggaagaagcaaatgggtttgctttcctagctctgtccagtaccttagggaccctgagaactggagagattcttggagagccatctggtgtatgtcatgggtgggccttgtttgaaggtcagtctgcccagtgggctggctcagcccgaatgaactcccttgaatctttggagttgtctgtgtacttttaagggtttctcatctttgcaccaaaagatcccctggaaattaggtgggaaaatcttaacttttgtggagccttgtatttgttttaaaagttcatgcacatagccaggtgtggtggctcccacctgttatcctgtcctggatcccttgagtcaaggagtttgagaccaacctggacaatatagtgagaccccatctgtacaaaaaataaaatattagccaggagtggttgtgcgcatctgtagtcctacctactactgtggctgaggtgggaggagcacttgagcctgcactgagctgtgatctcaccagtgtattccaccctgggccacagagcaacaccttgactcaaaagaaaaaaaaaacaagaaaaattcttgaagatttttcattctgtcccactatccattggttttcatgtcaagataatgtcagaaattctttacaattgcttccagaaggagtagccttttgatctagtgcacagatgtccagtgttttggcttctcagggccacattggaagaagaatgctcctgggccacagataaaatacactactgctaacgatagctgatgaacttaaaaaaaaaaaaaaggtttgtgcataattttcatgatacccaccaccacagataggcggaaaagtccttgtagtcaaagggttggacatggctggtctagtgtcttgtcgtccgttttggctttctccctgactccagaatgcaggtggagatgtagagacatgatctcaggacagctgttgagataaaaaaaattcgttgtcatttattcccaagcacagcttttttccatttgcattgaaaaagtctccattcaaactgctgtcacatataaaatctatttatatgcctgtatttttctgttgtcttggcctttgtgggcagtagtgtgttttaactgagcaaactgtccttccaaataatgaagctgaagtcagcctacctgcttgccacttttcttccccttccatttttctaacctcaggataattgtaagaatgaattaagatttgtgtttaaggccgggcacagtgtctcaggcctgtaatctcagcactttgggaggcggagatggatgtatcatttgatctcaggagttgaagaccagcctgggcaacatactgagactctgtcttgtataattaaattaaaatttaaaaaaaggagagaaaaggacctgtgtttaaaatttaaaataaggggggaaggtgtaatgcaaaatgtggactatgctagctatgattgggaaaaataatttttcatacagcattatctgttgacttgtattagcagcatactggtcataagcgttttgctttcatcaaatatgataaggtaagctactttaaagtgtggtggggctttcttctgcatggctcctggaggtgttgagtcccaatttagccaattaatttgggtttagttttgatatggataagggagactggcttcattcatgatgcacacacagttttgccaataaggaaaaaaaaagcaacctgaatgttcctactcattagatgctatctggagagctcctatcccacagccacaaaggccctggcccttaaaaagactcaatgcagcctttctgcatctcatactgtattctgcaagatgctcctgtgaaagaaagttgtgctgcatcagccatctccctcctgaagatccctgtggctgaggatttgtgttttgaaggttctcagaagtcctgcaacagttctcaaacttatttgtccaggggatcttttctttcactgaatgtagttggggagacatagccttaagccatgagcagagaaagagacaagaaactgttggctcacttacaaccaagtgttgtgtttatgttttaggtttttatgaaactgaggtgctgtttgaggtgctgaatcaaattgggtggttgaagagaggctggtatccctgtagacttagccagccatgagaggttgagttttgttgaaggaggtgttttacaaagggaaatagggtgtttcctgggcatcacattagcacttaaatacatgtatcactgaaatgaaatgaaatgaaatgatgaaatgatgacatgaaatgaaatgaaatgatgaaatgaaatgaaatgatgaaatgaaatgataaaatgatgaaatgaaatgatgagatgaaatgaaatggtgaaatgatgaaatgaaatgctgaaatgaaatgaaatgatgaaatgaaatgatgagattaaatgaaatgatgaaatgatgaaatggaatgatgaaatgaaatgatgaaatgatgaaatggtgcaatgaaatgaggaaatgaaatgaaatgctgaaatgaaatgatgatgtgaaatggtgaaaagaaacgaaatgatgaaatgatgaaatgaagaaatggtgggaaatgatgaaatgaaatgatgaaatgaagtgaaatgatgaaatgatgaaataatgaaatgagggctggagccaagactggccgaataggagcagctccagtctacagctcccagcnnnnnnnnnnnnnnnnnnnnnnnnnnnnnnnnnnnnnnnnnnnnnnnnnnnnnnnnnnnnnnnnnnnnnnnnnnnnnnnnnnnnnnnnnnnnnnnnnnnnnnnnnnnnnnnnnnnnnnnnnnnnnnnnnnnnnnnnnnnnnnnnnnnnnnnnnnnnnnnnnnnnnnnnnnnnnnnnnnnnnnnnnnnnnnnnnnnnnnnnnnnnnnnnnnnnnnnnnnnnnnnnnnnnnnnnnnnnnnnnnnnnnnnnnnnnnnnnnnnnnnnnnnnnnnnnnnnnnnnnnnnnnnnnnnnnnnnnnnnnnnnnnnnnnnnnnnnnnnnnnnnnnnnnnnnnnnnnnnnnnnnnnnnnnnnnnnnnnnnnnnnnnnnnnnnnnnnnnnnnnnnnnnnnnnnnnnnnnnnnnnnnnnnnnnnnnnnnnnnnnnnnnnnnnnnnnnnnnnnnnnnnnnnnnnnnnnnnnnnnnnnnnnnnnnnnnnnnnnnnnnnnnnnnnnnnnnnnnnnnnnnnnnnnnnnnnnnnnnnnnnnnnnnnnnnnnnnnnnnnnnnnnnnnnnnnnnnnnnnnnnnnnnnnnngacacagaagacgggtgatttctgcatttctatctgaggtaccaggttcatctcactaagggagtgccaaacagtgggtgcaggacagtgggtgcagcccaccgtgtgggagccaaagcagggcgaggcattgcctcactcaggaagcacaaggggtcaggaagttccctttcctagtcaaagaacggggtgacagatggcacctggaaaatcgggtcactctcaccctaatactgcacttttccaacaggcttggaaaacggcacaccaggagattgtgtcccgcacctggctcagagggtcttatgccaatggagtcttgctgattgctagcacggcactctgagatcaaactgcaaggcggcagcaaggctgggggagtggggcccgccattgccctgtctttcttaggtaaacaaagcagccaggcagctggaactgggtggagctcacaaaagctccaggaggcctgcctgcctctgtaggctccacctctgggggcagggcacagacacacaaaaagtcagcagtaacctctgcagacttaaatgtccctgtctgacagctttgaagagagtagtggttctcccagcacacaactggagatctgagactgggcagactgactcctaaagtgggtcactgaaccccgaacagcctaactgggaggcacccccctgtagggacagactgacacctcactcggccaggtagtcctctgagaccaaacttccagaggaatgatcagacagctgaatttgtggttcatgaaaatctgctgttctgcagccaccgctgctgatacccaggcaaacagggtctggtgtggacctctagtaaactccaacagacctgcagctgagggtcctgtctgttagaagcaaaaccaacaaacagaaaggacacccacaccaaaaacccatctgtacatcaacatcatcaaagaccaaaagttgataaaaccacaaagatggggagaaaacagagcagaaaaactggaaactctaaaaaacagagtgcctctccttctccaaaggaacgcagttcctcgccagcaacggaacaaaactggacagagaataactttgacgatttgagagaagaaggcttcagaggatcaaactactgcaagctacaggaggaaattccaaccaatagcaaagaagttaaaaactttgaaaaacaattagacgaatgtataactggaataaccaatgcagagaaatgctttaaggatctgatggaggtgaaagccaagttttgagtactacgtgaagaaggaagaagcctcaggagccgatgcaaccaactggaagaaagggtatcagtgatggaagatgaaatgaatgaaatgaagggagaagggaagtttagagaaaaaagaataaaaagaaacgaacaacgcctccaggaattatgggactatgtgaaaagaccaaacctacgtctgattggtgtacctgaaagtgacagggagaatggaactaagttggaaaacactctgcaagatattatccaggaggacttccccaatctagcaaggtaggccaacattcagattcaggaaacacagagaacgccacaaagatactcctcaagacgagaaactccaagacacataattgtcaaattcaccaaagttgaaatgacggaaaaaatgttaagggcagccagagagaaagttcgggttacccacaaagggaagcccatcagactaacagctgatctctcggcagaaactcttcaagccagaagagagtgggggccaatattcaacattctgaaagaaaataattttcaacccagaatttcatatccagccaaactaagcttcataagtgaaggagaaataaaatactttacagacaagcaaatgctgagagatttgcttgccctaaaagagctcctgaagggtgcactaaacatggaaaggaacaactggtaccagccactgcaaaaacatgccaaattgtaaagaccattgagactaggaaaaaactgcatcaactaacgagcaaaataaccagctaacatcataatgacaggatcaaattaacacataacaatattaactttaaatgtaaatgggctaaatgctccaattaaaagacacagactggcaaattggataaggagacaagacccatcagtgtgctgtattcaggaaacccatctcacgtgcagagacacacatagactcaaaataaagggatggaggaagatctaccaagcaaatggaaaacaaaaaaaggcaggggttgcaatcctagtctgtgataaaatagactttaaaccaacaaagatcaaaagagacaaagaaggtctttacataatggtaaagggatcaattcaacaagaagagctaactatcctaaatatacatgaacccaatacaggagcacccagattcatgaagcaagtcctgagtgacctacaaagagacttagactcccccacagtcataatgggagattttaacatgccactgtcaacattagacagatcaatgagacagaaagttaacaaggacacccaggaattgaacccagctctgcaccaagcacacctaatagacatctacggaactctccaccccaaatcaagagaatatacatttttttcagcaccacttcacacccattccaaacttgatcacatagttggaagtaaagctctcctcagcaaacgtaaaagaacagaaattataacaaactgtgtctgagaccacagtgcaatcaaactagaactcaggaataagaaactcactgaaaaccgctcaactacatggaaaatgaacaacctgctccggaatgaccactgggtacataacaaaatgaacgcagaaataaagatgttctttgaaaccaacaagaacaaagacaaaacataccagaatctctgggacacactcaaagcagtgtgtagagggaaatttatagcactaaatgcccacaagagaaagcaggaaagattcaaaattgacaccctaacatcacaattaaaagaacttgaaaagcaagagcaaacacattcaaaagctagcagaaggcaagaaataactaaaatcagagccgaactgaaggaaatagagacacaaaaaaccctccaaaaaattaatgaatccaggagctggttttttgaaaagatcaaaaaaattgatagaccactagcaggactaataaagaagaaaagagagaagaatcaaatagacgtaacaaaaaatgataaaggggttatcaccactgatcccacagaaatacaatctaccatcacagaaaactacaaacacctccatgcaaataaactagaaaatctagaagaaatggataaattcctcgacacatacactctcccaagactaaaccaggaagaagttgaatctctgaatagaccaataacaggctctgaaactgtggcaataatcaatagcttaccaaccaaaaagagtccaggaccagatggattcacagcagaattctaccagaggtacaaggaggaactggtaccattccttctgaaactattccaatcaatagaaaaataaggattcctctcaactaattttatgaggccagcatcatcctgataccaaagccgggcagagacacaacaaaaaaagagaattttagaccaatacccttcatgaacattgatgcaaaaatcctcaataaaatactggcaaactaaatccagcagcacatcaaaaagcttatccaccatgatcaagtgggcttcatccctgggatgcaaggctggttcaacatatgcaaatcaataaacgtaatccagcatataaacctaaccaagaacaaaaaccacatgattatctcaagagatgaagaaagggcctttgacaaaattcaacagcccttaatgctaaaaattctcaataaattaggtattgatgggacgtatctcaaaataataagagctatctatgaaaaacccacagccaatatcatactgaatgggcaaaaactggaagcattccttttgaaaactggcacatgacagggatgtcctctttcaccactcctattcaacatagtgttggaagttctggccagggcaatcaggcaggagaaagaaacaaagggtattcaattaggaaaagaggaactcaaattgtccccgtttgcagatgacatggttgtatatctagaaaaccccattgtctcagcccaaaatctccttaagctgataagcaacttcagcaaagtctcaggatacaaaatcaatgtacaaaaatcacaagcattcttgtacaccaataacagacaaacagagtgcccaatcatgagggaactcccattcacaattgcttcaaacagaataaaatacctaggaacccaacttacaagggacatgatagacatcttcaaggagaactgcaaaccactgctcaaggaaataaaagaggatacaaacaaatggaagaacattccatgctcttgggttggaagaatcaatatcgtgaaaatggccatactgcccaaggtaatttatagattcaatgccatccccatcaaactaccaatgactttcttcacagaattcgaaaaaacgactttaaagtacatatggaaccaaaaaagagcccacatcaccaagtcaatcctaagccaaaagaacaaagctggaggcatcacgctacctgacttcaaactatactacaaggctacagtaaccaaaacagcatggtactggtaccaaaacacagacacagatcaatggaacaggacagagcccgcagaaataatgccgcatagctacaactgtctgatctttgacaaacctgacaaaaacaagcaatggggaaaggattccctatttaataaatggtgctgggaaaactggctagccatatgtagaaagctgaaactggatcccttccttacaccttatacaaaaattaattcaagttggatcaaagacttacatgttagacctaaaatcataaaaaccctagaagaaaacctaggcaataccattcaggacataggcctgggcaaggacttcatgtctaaaacacaaaaagcaatgggaacaaaagccaaaattgacaaatgggatctaattaaactaaagagcttctgcacagcaaaagaaactaccatcagagtgaacaggcaacctacaaaatgggagaaaatttttgtaacctactcatctgacaaagggctaataactagaatctacaatgaactcaaacaaatttacaattaaaacacaaacaaccccatcaaaaagtggttgaaggacacgaacagacacttctcaaaagaagacatttatgcagccaaaaaacacatgaaaaaatgctcatcatcactggccaccagagaaatgcaattcaaaaccacaatgagataccatctcacaccagttagaatggcgatcattaaaaagtcaggaaacggcaggtgctggagaggatgtggagaaataggaacacttttacactgttggtgggacggtaaactagttcaactattgtggaagtcagtgtggcgattcctcaagtatcttgaactagaaataccatgtgacccaaccattccattactggatatatacacaaaggactataaatcatgctgcaataaagacacatgcacacgtatgtttattgtggcagtactcacaatagcaaagacttggaactatcccaaatgtccaacaatgatagactggattaagaaaatgtgtcacatatacaccatggaatactatgcagccacaaaaaatgatgagttcttgtcctatgtagggacatggatgaaactggaaatcatcattctcagtaaactctcgcaaggacaaaaaaccaaacaccacatgttatcattcataggtgggtattgaacaatatgaacacatggacacatgaaggggaacatcacaattcggggactgttgtggggtggggtgagtggggagggatagcattaggagatatacctaatgctgaatgacgagttaatgggtgcagcacaccaacatgacacatgaacacttatgttacaaacttgcacatggtgcacatgtatcctaaaacttaaggtataataataaaataaaatagaataaaataacaaaatatacactaatacagattaaccaacctaaaaaattgtagagaaaggtcatttaaaaaatatgaacgacagagtaataatctaacacgttgaaatctaagaaggagaaaacagcttgtctgaacagcattttaagtggcaatgttagaggttttatcaaaattgaccaataatattaaacgacaggttcaggaggcttttcaaagcaaaggaaaacacacacagaggacacatctagaaacataatgggacaatttctgaaaagtaaaagaaaaatgtaaagagcacttgataaaaaattgggctaactacaaagagaaagagttgactgataacaactttctcaaatgaaacaacgaaagccaacaagtgaggtactgatatctttcaagtcctgaaataaaataagtgctgacctagaactgtctgcttggtggacatatccatcaaaagcaaagatacaataaagaatttctcccaagcagacctacaggaaaagaaatactaaagattattcttcaggtagaagagccatgatccctgatgaaagtttgcagttagaagaacaattttttaatgaaagaaataaacatagagagaaatttaattggatattggctgtgtaacagaatgctatctcataaagtttaaaatgtatcttccatacaacggcagaagtatataagttgtgagttggataaattaattttaaaatattgtcaagtttttttttttttttgcaaatagacagatgtaccaattatatcagactctgaattcaagaacgcacattgtattaaaccaggtaaaacataaccagaccagattttttaaatggactctcttaaagttttaataatttatattcatatttcacatatgttgaaagtaaataatggaaaagcatgcaatgcaaatattaaccaaaatatagctttagttgtacttatattcacattttaaaagttggacacagttaagtctcagtgatttttttacacaacggaggcaacctgtgcagttataactaatattatattatgctcttggcctgattacagaagggaaaggggagatcataccagacaatggcagaatgaagcaacaaggagtagagttacagaacatgatgctgtaactgggaccggagttacacttttagagttaaagaatagtaaactggacaaaatatatgaaactttttttttgaagtactgaacatcaggcagcacaggactgtgctctgcaagagaagagaaggagccagaatgagtcctgctttattcccagattctccgtgacagcagtagagaggaatcccagagaaagcagacattgtcattgcactgaggaaccagataaaaatcaaaaaaggttaagcagctggaatgtgtagtagaagagaacgtttacagaaaaaggaaccaagaatcagcctaaggattctcccaagtccctaagccaaatgtacataggatgaaattctaaggagctcagcaaaggactctaccagggagttggaagaagaacatttccctggcatcacatgacaggaagacacgttagctctgaccagccagagaagggaatcccctctgtacctccaggatattcagtaaagaccactggaggttcatgccctagtgacagtgctcatttagctccaaattacagatggctctagactaactcaacaaagtttaaagagaagatttaaaacaacaacagacaaatactcatcctgaagttactgaactgcctgccacaacattgttcaaaggtagccaatcaaatctagatcttcaatagcataacaccaaaatacccaaaaatctctgacatgcaaagaagccgtaagatatatataattaagacatatattgacaggataaaaataagtcatttataaatgacagagaaggaaatttcaaggtccttaaagtaaatatattttataaatacatatagataaatacatatatatgtcaaggtacttaaatgaaaattgaacataggagaaaaatagaagttataaaatgaaaaatgtgacatgtatagatgaaaaataaatatttgaaataaaaattccatgagatagaataagtaatgcattttaccctaacatcagaaaatttatagaacaaaatagaagctttacaaactaaaggacaaagggtaaactaaaataagaaagccagaaactcactgatacatcagacaatatgcagcagtgtaacatacatgtaattaatatctcaaaaaggatgggtgggggaattataggtgaataaagaatggtacactcattcctgagggcacagaggagggaggatagctttagattcctaagggagggtattatccattcatgaaggtccaacccccatgaccaaacacctcccagtgagccccacctgcaacattggggatcaaattttaacatgatattggaaggggcaagcattcaaaccacagcaagagttaaatttcctttttaagaaaatcactgatatgattccatttcgccatagataaaagctagtatttcagcctaccattgagtgtgcttatagctcaccaaaagggcactctgtctcgggaatacagatttgcctagaggtatcctattgcagtcaaagaaagagcaatgagggatagaaaaggttaatgatggagacaccagtgctgcattttgcaacaaacaatgtaaaaactttacggattggttctgctaacttactacagtttacattcctctcaggtgggagaattgttgcgttttttcttaagatagaaaagcaattcagataatctgaaatctccacaagaaggatgagaagcacagaagaaactattctaggcaggaagtcaatcccttaactgtctgtgctccatagaaacaattgtctgcactgggagtcatatgaggtacagaccacagccagacctctgatcctctcattagtgatttcagaagaaattaccagtcaactgagtaactcactgagtaaacatttggcactgaaagaggttagacggataactatttgtatcaccatattcatgaggctggaatattttccattactggtatcacatccgaatggaagatgttaaaaggtctctcatcctgtaagatggatatgaaagaacattttctgagaaacgaaattattaacacacctgcgaggtggatggaagagaaaaaaagaataatcagcttgagttcttctccgtgataagagaactcactaaaaacataaagagaaaaatacaagtttaaaataattaaccagaagaagacgactctagagattttaaattgctaataatattttaatttgctccaagttgaaaataattatattgcttgtgttttaaggcacataatgagcaattatatcacacatgatagtttcagcagtaaaatattatccgttaacagctggaactcacaaaagcatagcacaatgtgaagatggaatttgctaaaataaaccatctgctgaaaactactattctgcaaatttaaaaataaagtttaaatgttatttgtcttatttaataggtctgtgaaaaaaatgcgctatttgaaaagtagctgctaccttaattctttatattagacggctggttacagtaatgcacagtaaggtgctacatagatatattgctaaattttctgcatatactatgtatttggcttaaattatttgaaattttatagttaaagtaacaaatgtatatttaaatgttttgacacaaattgcaaatatccctttaaaaagcgtcttacactctaaatattatttgtcacctatatatttgtcttttctctataggaaagtttaaatttttcccttgaagctttaattatttgagtctataaaacaaactgataatgtacaaattaacaggaagaaaaggtttacggatatgtgcacaagtatgcacttggagtttacataatatatataaatatatctatacaaatatttgtatattacaaagagatatacaaatatatactatatatataaaaactcccagaaaggcaaggtagtcaacacgcctatgctatcttgaggttacagaaaacacagagctgtaggttggtaaatcaggctttgcggaagacaggtgacaacaaggaagaaagaggagtctggcagcagaggtggtcttgttacatggatgaaacctcacagggagcagccctcctcttgggaagtatagataggaaatggtttttagaaatgtaaacgtgccaggctcagttaatctttcctaaacccagacaagggagtatctcagggagagcctttctatatcaatgcagattttctctacaaatgcaaatctccccaacaaacacagcttttcagctattctcgtagaagaagctatctccagtcttccgagtagccatcttgaaatatgtcaaaaagctggccgggcgcacgcctgtaatcccagcactttgggaggctgaagtgggtagatcacctgaagtcaggagttggagaccagcctgacctacatggtgaaaccccgtctctactaaatacaaaaaattagctgagtgtggtggtgcatgcctgtaatctcagctacttgggaggccgagctaggagaattacttgaccctgggaggctgaggttgcagtgagccaagattgtgccattgcactctagcctgggcaataaaagcaaaactccatctcaaaatataatgtattttagggtaatatttgagtatctttacctctatatgtacaataaatattattgtgatttttaatcttttctgtggagaaaacacaggtgtgatttctggtgtagctgaacatcgtttatttgacaatattgcacttatgtgtgggtgtgtgcgtgtgtagctactttttaatttggttctcacataatgatgagatattaacaattaattcagtaaaacgtatgttttgcaatatttctccatgttattatgctttaaattagtttaatcatgcccctataatgtgtacattttaacctttgactataggtctcaatctcactttggttcctgtatttgaatttatgctaataaagtcctatagctaaaaaagattatataaacttatctacatttttactagtattctggtgtcatttttaattatgtaatgaaatcaaattttaatttggattattgttatctgagttaaggatctaaatttttaattttcttataaatattacataattatttctgaaccatatattgactaatctgccctttatatgatgtgtattataagagcttgggattgtttcatttgcaaagatgaatgcttgagaagtagatatttaatcataacatttcaaaatctactggataacctagaattgaaaaatagcctataggttgaaaaactcctgtagtgaagaaagaaaataactaatgtacagtgacactataaatattataaatatttattttattatcaccctgaaatttgataatacaaacatgtaatatccacatattatccatataacaggtcataaaaaatcaatacattcttcaaaaatttagcataacagaaaatgcactctctccccttgatggaattaagttacaaatatgagtaaaaataagtagataagtagatggaagtagatgtttcaaaacaaagaaaaatatttgtcttggataacatacaaactcaattgacaattccaatatttccagaactttgcctgtcaactggtggagagttttccccaggagacatttgtcaatgtctagggttattgtggggatgtcaagactggtggaggtgtgaaatttagaggtcaaacgaaacacctagtattattagggcagcctcccacaacaaagaatcctctggtcctaaaggtaagtagcaccaaggttgagaaaccataatctagacaggaaacactacgtagctattccaagtgttcaggaaaacacatcagtgccctcgaggggaaaagtgtaaacattttaattgctgtacatggtgacacaaatccatgttgttaatctaagtggaaggggctgaagcacaaaacgtaatttaaagagtttacttgagccacaatgaggacagctgcctggaagaaacagacccaagtatccttggatatgaactccctttggagctttgcaacaagcagtttcttaaaggcaaaaacgggtccagaagtgggatggtgcaaagaggtttgtcacaaattctcattggcttatggaaataacatttattagtgactggctatacactgttacactgttattgggcgtggattatagtgtctggtgtggcgttattggttaatttatagctactgtggcaacagcaagcagcctagatgaacacacagctcaaagaggagcaggacagaactgctgtctcatttgaatatctctctgggcctgattatttaaaaggacttgcatttctcacatgaaagttattttcttttctcaatgtccataaatgagaataaatagacgtaaaatagatcttttcgaggacgaagtaaatggaatgaaaaacaaaacccaagctgaccagaaatcatacagagaagaaaaggttataaatatatggatttttcaaagtgattttaagctattaagaatcagttaaatgttgggggcttttgtctgagaatgggctaaaggagaatgtcccttttgccttctgaagtttccctgaaaatcactaataggaggcagataaatagtagaaaaggcatacaggtttctgcaatgtgtgtacactggagcccttagaacgaagacccagacacacgatgcgtgcagaagcttatctaccacatgaagtttacaaaaagaatggggtcttggatcacagggaaaaaaaagagaaaggttatgtgagaaaacgaccgtggctagcaacagtggacttattacataggtggaacctcactgggagcagtcctcagagagaatagacagaaaatgtttctttcagacctttggagacctcagactctcagttaacatttcctagatccagacaagggggcagacctcagagaaagcctggctgcatcaaggcagattctgtaccgatgcaaatctccccaagacagctttgcagctaagtttgcatttccagcccttctccatagccattttgaaatatatcaaggaaatatatttaggggtaaaatatattagtttccgtcatacagctataaaacatacaggaataatttttgtcaatgtctactacaaatccaatatagcagtaactataaaacccgccagatattgaagaaaaaatatgtagagtacctcaattacaaatgttgatactaaaatgctaaataaaataaaaataatatccatcaatatttgaaacagtaagacaagaaattggcaaaaaaaaaaaaaaaaacaaacaaatatccaccttgggaatgaaagtgtgtttccaaatttggtaatccaataatattaataatcatattgattagcccaaattaaaaataaataggggattctcagtacatgctaaaatatatttgttaaaaggcaatattcatgtctttaaagattttaaatgctataaagagtctgatattctatatgcaaacatgtgtatgtccattagaagaagagaggcctgattttcatatgttactacatagagatagagaagtggatagattaattttcatatgcatagagaaagcataaaatagaaatttactatcatattaaaggaattttaattcaacaataaaataatccaaaggtaaaattttaaatatttttaacaggtacattatgaatattagataatatttataataattgggaaaatattcaatgctaaaataagatacaatgtctaaacatcagtattaaaactagtataaatatttgtttgtttatacagggaaaattcaagctcgacctaaaattatatgggaaataaaagaaaaattttaagggagctctttaataacataaacatatatatacacacacacacatataacatgtatatatgttatatgggatagatatagatttaacatgttatatctatatttgtatctataactacagctgtatgtatctacatttctatatatttactcagtgatataaatatagactggaataaatataaggacacatatgattcttggataaaaaggatttagtatcataaagacaaattctttccaaattcacttatgaattcacaacaatatacagtttcattagtataatttaaaatttttaaataaattccaagattcatttaaaggaatatacatgtatacaagcagtcaagaaagaagcaagagtgcactaaactaacttgctattaaaatacatttttaaacttagtcactaaaagtgagcattactgatttggagtactggaatttaggtatacgggatctcaaaaacacagaactcaaaggagacccctgtatgcacgagagcttaggatgttctttggaaggcattaccaaaccacgggcaaagttactttagtgtcttagtcttactaggtttgaaaagccagagagaagactcaagaccaccatataagagcaaaaacaaaaggacagggagagaatgtgaagatactaaaacattttacataaagttgtataaaacatcctttaaagaaaatataaagtttaggatatacatcaaaatcagcagagccactaaataaataaataggcattgtaaaataacaagagaaaatttaaatggatttctaaaaaatattgacacctatgatttttaaaatacgtttaagaaatcccgtatttcacagggcagtagttcacaacacagatatgttaggacataaaggtccttctgtttttaatttactagtgtttatagggttacaaatgtcttctacctttgtcttttgtctgatggtgcaaaaaattttcataagcatgtatttctgaatgcctgatggattgacatatataatatgctgctagtattaaaatatgtgacggaaaacgcatccaatcttctcactgtttacataaattctaggtttctcctatttacctcaagcacgtatggagcaaattcttaccttttaatattgccatggcattcacattgaacataagttgaactctctcatatggtagctgggttcggattcccttgacaatttccagttctaaccctcacacttcctcagtgtggctggcccagatattgaccctacacagttgcctccccctggtgactaccagctatggaaccgttggatacaaactacctgactcaccccacagacctcacagtgcacatggacagcccccacacgccagagtgacctgctcagttgcagcagcagtcaagaaatgtgcctgctggcactcaccccaccgactagtgccctgtggaaaacttatttggataatgttctgggcccaataaagtctggagtcccacagacccctcttctctctcctgctccccactcatcttccccattttgttcagccctatgaggtgtactactctattagtccattttcacaccaccagtaaagacatgcccaagactgggtaatttccagaagaaagaggtttaatagacgcacagttccacatggctgggtaggcctcacaatcatggcgcaaaatgaaaggcacgtctcacatggcagcagacaagacaagagagcttgtgcagggaaactcccctttataaaaccatcagatcttgtgagacttattcactatcagaagaacagcatgggaaagacctgccctcatgattcaattacctcccacctgttccctcccacaacatgtgggaattcaagacgagatttggctggggacacagctaaaccctcttctcagctaccctcttctctctggatctgtgagtaataaacctacttctgtgatttcccatgtttggttctgtggcctccatgtgtctgagctgacctacactggaacctaactctcctcctggccagggtctctgagagtggctcttgtcagaaatacacaggacacaggttaggcaacagtcaccaggcatctcctagtctcaacagatgttctgtgagagggaggcctggtcgtgggatgcacacctggccactgctggggtaaggaagtgtcctgtgaaaggcacatgttaagcatccacaaccccctgcccagaaccccagaaaggcagggctccaattgacagtcactctccagagacaaacctcaagccctaactggaggaaaagaaaacaatgtaaaaagttgaatttatcttactatttcaatgatccagtaaagacattctatgcctgtacaccacatattttctttgattgtggatttattttagatagaattttaggtctggctttcactttagcctggtccctacttcaagcataaggtaaagattttccatgcgttcttttctggtactactacctgccagtgtggggtcatgtcctagtctatcttgagggaatccccctgttcgttattgtcagagtgagactaagtcttgatttccctggacaacttcactgcatgacttttaatatgattttttaatatactctttactggacaataaattatatagttacctgagtaagagatatggtcaggaagaggcattgcctaattcagcttttctctttggtgaactcgcatatgttctccttacccgccagtcacctctaaaccgtattgttccaagacaacaaacagaactcgagtgtgtatctttcaccactggatttgtgtttcctccataaagctttgtgcttaatagggtttctgttagcattttctctatttattttcccataaaatatcacaggccttcttcatatggaattatgggtgatttccttcaatctgcatcatatcaagttgaggttcatcttgatgaaaagtaaaacatactttgaaaatgtcagtaaggatgatttcccctcctttttagcacctgtgcttgtgatacaagcacattttaatacaattgtagtctcatgctttgatcattcctatgatgaaaataacatttttagataaaatatctgagttttatgaggcctttagtatgtgatgtgatagaagaacagaagaccatacttttttctagttttccgtgcaattctatcattgtttcatctttactcctaccagagtaattttccaaaatagatatcttgtcattcttcctgttgttatcagtaaataagtgaaatgaacagctagattatataatttatctacaacaagaaagtagaattgaatctatattcattaatgagaataaccagtcaattacacagataggcattttacattttgaagatcatatggacccattgtcagatatattattatttatgtctacatggacatcacctgtgcatatttaaatacaaatcaatgagagctgatttttatttttattatatatatttttgagataaggtcttgctttgttgtccaggctggaatgcagtggtgcaatcactgctcactgcagcctcagcctaccaagctcaagcaatccttccaccttggcctcccaaatagctaggacaacaggtgcacatcaccatgcccactttttttttttaacttttgatagagactgggtcttgttatgttgcccaggttgcttttgaactcctgggctcaaggaatcctctcatttcagcctcttcaactgctggtattacaagcatgaaccaccatatgggctggaagctgatttttaaaatactgggatcatatagatgacagcacctgaaaaacagacaacaccaagctttatgttaaaaggtgtgagggtatcaatattgttgtggctattggggaggaaaacattagtaaaaccagtaagttaaagctcttgctttaaactttggctttaatttaacaaatgttctatggagtgacagtatgtatgtaaccatgctatgcccattcacagatgcagtagagggaagaatttctcaaagacaactgttctaagactcaaattaaaccgtactgggtttgaaaagagaaagtccaggaattaccaaatattttagatatcagatacaagagaatgacaggtatgcgatgataatcagcaatggttgttcacacaatacatcaaatcagtatttgaattagcttttgaattacaaggacaaatggatcaagtctagactctttagtagataaatcttattaggctgagatgtgttttcccctgtttttccacaaggagattacaaatttgcaaacctcagctgctctcattttatgctctcaccaagccaaaagctgaagttcatcaataagtgtgtctaagtgttcactggttatataccattttgtagtttcagctatctttccaacttcctaaatcatcaccttcatttgatctggtttttttccactatcacctctttattgaccatataaagaatataagtaagttcttattttgttattgttcattttagtctaatttcatcaaaagatcacaatcttttaatttcattttaatttcaaagattaaatgaaacatacatagaaatgagtgtaagatttgcatttgcattattttggcatcaatttgctatcctccctcatgcacatagagatcacttccatgtacgtgatttcaaacatccaagtgcagtattaaaagcagttgtaaattatggttctcattttcatgatacaattacaatataaacttactcttgctgctgtaaccaattaccacaaacttcatatcttacaataaagtgatcgttaatcctacagttctgtagttcagaagccttaaatgaaactcacagggctaacatcaagttttgggcagggctgcagtctttctcagggctatgtggcagaatctattacttgatttttttcagcatccagaggccacctttattccttggaacatgacctcattcttagattttatttttcttttttttttgaaatggaatctccttctgtcacccaggctggagtgcagtggcacgatctcagctcactgcaacctctgcctcccgggttcaagtgattcttctgcctcagcttcctgagtagcttggactacaggcacttgccaccatgcccagttaattttttgtatttttagtagggatggggattcaccatgttagccaggatggtctcgatctcctgacctcgtgataaacccaccccagcctcccaaaatgctgggattaggcttgagccaccgcgctgggtcctcattcttgtatcttaaaagtcagtgatgttgagtaatttctcatgccaccacctccaaggttgcctttcttctgccttcttctttcacttataaggaagtttgtgatttcattgatcccacccatttaagacaatctctctatcatttttccgcaaccttagtttcacttgaaatctaatttcacactgccgtgcaacctaacatatttgtatgttagactctgggaattaggacatgaaaatttttgggagaccattctttggcctacagcagacaatctatttatctgcagattaaagcgttcttcatttttctgtctccctctcttaatttttttaaaataataagaattgtagtaaagagaaagaaagaaaagaaaacaaagaaagaaaaagaagggaggaaagaaggaaggaaggaaataaggaaagaaagaagaaagaaaagaaagaggaaatgagggaaggaagggagggagggaggaagggagaaaggcaggaagggagaaaaaagaaagcatgagcacaagaaagaaagaaggaaggaaagaaagaaagagtaagaaagagaaagagagaaagaaagaaaggaggaagggaggaaggaaatgaggaagagagaatggtaaaagggaggaaggcaaagaaacaaagaaaataaagatgcgaaggaaggaaggaagaagaggaatggaagggagggaggaaggaagaaaaagagggcgggaggaagggagaaaaaaggaaagaaaacaagaacgtgagaaagaaagaatatgagaaaagaaggaagaaaagggagggagaaaagaagggagggaggagggaaggaagaagaataagaggaaagaaagaaggaaagaaggaaggaaggagaaaaaagaaagaaaagaaagaaaaagaaaaaagaaaagaaaaggaagaggaaaagaagaaaggaaggaagaagggaagggaagggaagagaagagaaaggaagatggaaagaaggaaggaagaacgcaaatattagaaattctaggtttgttagagaatatgccatactgtttttttttttcacttgaaaggaaagagtatctgccattgaagattggatgtcttgtttgtgatattgttgttcttatcttccacatgattactgagtttatgcctagtctttccattactaagacaaaagttttgaagtctgtaaatataattttggatttttgtagctcacctttgatttctttcctgttttacctcatgtatttggaggttctgttgttagctgcataccctaattactaggatgtttacatcttcttgagaattgattattctattatctattatctctcatctctgatactatttcttgttccgaactctgttgtgtctaataccaatgtagtccttccacagccttattttagtgtttccatgatatggctttctccatatcttgatgataacctatttatatctctatatatttggagcaagatataaaatttagacttgagtttttaaagatttttcaagatgtaattcttatttctttttgttctatttgacattctctgagtttcctatatttgaagtttgattttctgtcacttcttttagaatatttttggcagttattttgaaaaatatttcttttgctccattatttttccctcttttctttttgggatttcaatcataactagagtaggtaatttcatctcagtcttatgcaggtactttttctcagggtctcaggaatgtagacttctcacacttctgttcttttcctggctgtgttggtgagctcagtgataatcctccttcaccttcaagagcagttttgttttgtttttcctgttttcatactcccagcatcaggagtattctaagtgtggcagtttttgttgccttcccctacatattaagtggaatatcttggtctatttggactcttataacaaaataacataaaccgggtgactaaaaaacaacagatattacttttttcatacttcttgaggctgtaagatctcaggtcaagatgctcacaaattcagtgttgatgagagcccatttaatggtttatagatggtgccttctttctatgtcctcacatagtggaaggcacacaagaactccattgagcttcttttataaaggcactaatcccattcataagggctcggcccccaagacctggtcacttcccaagtgttctgctctccctgatgtgtgtcatatacagactctcttggattccttaccaattgcttgagagatcacagtgggtttgtggggaaaaagttttcaagataatggatctttcccaacttctgcagctgtcagcggtctcccaatctcaccagccccactttgtctttaggaatttattgattattccagctttacttgtcacagtggtgtctatttgcatctgtcctatgtaagtgcatctgtcctctttctccttgcaggtgcttgttttccctcacattttgactcagttcttggcaacctcgttgctataaaaataaagtcatgactttgaagtttgtttggttctttcattgttgtcaggttaggaaccctattccatcccagatttccaaaacccagactttttggggggttgaaattttaggcttattctttgaactgtagttttatcttctttcagctaccatatgcattttcatattgattaatgagactaagctttttttgtgtagttgactgtatctttggatttttttcccaaatacctttttatttcttcttttctttatggttttagaaaatgtcttttacataattgcagcttgattttttactcagttaatggcatgcttaaaggagagaaaaaatattaaatatctttccctttttaattactgtgcttttttcttttttaaggaaatatttcattatgttaaatttcagtgttattctacttagctattccttaaatattatagtattttggatttcacatgtaaatttgtaacatagcttgagtttattatgtatagagtaaggctattttctcttttttgttttttaaggtaaaaatcacataatataaaattaataacaaccattttaaagcatacagtgcacttgcttttagtatattgacaatgttccagggcaatttcatcatgtcctttccaaaaaccaattatgcataaagttgttacaccctattctgcttccctgggccctagtgaccactattctgatttatatcccaattgatttaccaattcctgatgtttcatgtgaataaaatcaagtaatatttgtcctgttgtgcacttaacataatgctttcaaatttcaccaatattataacatatataagtacttcattctttgttatagctgaaaattggctgtccatttatgagtcaacaagcatatggattgtttctactttttgactgtatgaatattactgctgtaaatattcatgcacatgtttattttttgagcacctatgttttgtaagattaacagctgacttaagagaaacaatggaaggcaagagacagtagaataatatattcaaaagatgcaaaggaaaaaaactctcagccacgaattccttatccagcaattatttttcaaaaatgaagataccacaaagacttacccagataaacagaaatattaactgaagttgttgctggcagacctaccatataaaaaaaactctaaaataaattcctaaggctaaaacaagttacagaagacagtcacttgaatccacaattttaaaaaagcactggtataggtaatattgacattataaaagacagtaaaaatgcattttttctctttatcataaattgtttattaaataacatgtgtataatggccaggcacgatggctcacacctgtaatctcagcactttgggaggccaaggcgggcgtattacgaggtcaggagatcgagaccatcctggctaacacagtgaaaccccttttgtactaaaaatacaaaaaatgagccgggcatgatggcgggcgcctgtagtcccagctactcgggaggctgaagcagaaaaatgacatgaagccgggagatggaccttgcagtgagcggagattgtgccactgcactccagcctgggtgacagagggtgactccgtctcaatgataataataataatatgtgcataatgtattactgagtatttgaaatgtagaaatggaatacgtctataacatattttccagtaacatcaaaaaggaggtagttggaagaaaaatgtattgtgataaggtaataactctagaggtaaagtaataattactaaaatgtattgttggctttgtaactttaatagatgtaaagggtaaagtgataatactttaaaatggaggaaataaaagagatttatataagaatgatgtttctatgtattactaaaagtttactagtataaattggaagatgatttgaataattaattttccatatacctatatggtaaacttacagcaacaacaaaaattctcaaaaatatataataattcattagtaatctaaagttccctattttagaaaatattctttcattgcaaaataaagcaataaagaaaaatatttgagaaatatataaaacaaacggtaaaatggcagacataaatagaattataccaattataatcttaaatgtgagcagattaaaatccattccagaggcagacattgtcagaccggattaaaacaagtgatcccaatatacgccgatatgcaaggattctaatggattgaaagtaaaaagatgacaaaaaaatatcatgcaaagagcaatcataagaacactgaactcattatactcataacacacaatatagactattaaaaatgtgaataggattttaaaaattgatattgtagtaaaaagggggtcaacgctttaggaagacatagctattacaatcatgtatgcatagatatgagctaaatggtttcctctatatagatgctgaaattctaaccactgaatatgacctcattaggaaataggttctttgcagctgatcaagttaagatacagtcagatgagcctgaattcaacatgactgatgtccttattaaaaggagaaatttgagtagagggagacatacacacagggagagtaccatgtgattatgagggcagagattagccaaggaatgccaaagactgccactaaaccaccagaagtgagaaacaaggcacagaacaggctttctctcatagcccttgaagggaccatccctgctgacacctgaatctcagacttttagcttccaggactataagactatacatgtatgttgttcaaggcacccagtttgtgttacttggttatggcagcccaagaaaactaatacatgaactaataacaaagcataataacatgaagcaaaaaattgacaaaagaggagcatcagcaaaatggcagtggagagagctgcaatctttcatttccccacagaaacatcacacaactaagagaaactgtccgaataaactttgccaaaactctggaaaatggtcaaaagattacaacaaccaagtgaaagcagactcaagaaaaagacaactggaaaactttacgacatttttaacttgcctttgccccagcaaattggcagttttgaagtgtcagaagcccacgttcccagtgaggaagcctggtccatggtccaaaggaacaagagaagatcttacccgcaaattattatgtgtctgttctgactggtctgggggatacctgaaggactcatgaaaggcttttttttttcctgtgttgctagaatacagaacagataaggaatgggcattattaagaaactctgcaaggagacctaacaaaccacagatgattagggcaaaaattagagtttacacatatagtagatcaccttcagcacagcaagaaaagttggagaagagtatttcaaaaactaagacatacaaaatcattcacgtacatgggagagtctagaaagtcacatgtattcataggttaagccacaggctgacaaatgtcataagaagaccctacacttttaccttggccgatccctcccctcagtgcaagctccgtgcaagagtgaacttgaacttcactcagtgcaagagtgaacacacactttgtgccggctttaaagaacccagcacaaagccagtctgcatggcctagagacatattttgctggacaatgattacttgtttttcttgtatttgcctgtttgattggttcctgacatacaagaaaatcactgtcaaaacattagcttaacatttgttaaggaaacaaaaagacttcggtgaccacactttacaaagcaaacagttttgtaaatcactttggaaaatttcactaaaaaaaaaaaaatccttaacaatataataagtaaagaaaatttaaaaccacaaaacattactgtttttgtagtgggggggtctgatttacagagtaaccacatagtaattataattattagaatgtccagttttcaaaaaacgttacaaggcatacaaagaatgggaaagtgtggctcattcaaaggaacaaaataaattgacagaaaatatccctaaggaaacccagacatcaaacttactagacaaagactttaaaacaactcttttcattatactcaaatgtcaaaaggaaaacataaacaaagaaataaaggaatcagaaaaaatattaaaaagtaggaatatcagcaaagagataacagaaattctagagtggaaaactacgatgataaaaattcaaaaatcaccagagggatttaagagtatatttgcacacacagaagaagccatgaacttgaagagaagaaaatggaaaatattgactctgagaaacagaaagaataaaaaataaacaatgagcagagactaatgaatctgtgggacatcatcaaatagaccaacattcatattctagaaggacaaattatgttgttaaaaagtttaccattctttcttttcacctttcttccttcctccttccccctcctcctttttacttttcttcctcttcctttctcttcttctttctccccttcattatccctttcgctgtttctctttctccctttctcttttttcttttctttcaattttctcaattactaagagatgtttaagtacccttaccatgttagtagatacggttatttctccctttagttctcttttgagatttatagtcactctaagttaagagataacccaaacataagcatcacaaacaggctttcataccattcttaatttggtcctgtaattcttcattgctgtattaactttctgatgcttttaaggatgttttataacaaattgtttagtttttttccaatggaatgtttattctgaattatctaattcatattgtaagtatatagggagtttaatataaaattattaaactaatatttgtgaaagaatgtatttgtgcatttaacaaatatgttaatcctcagactgttattgggcagctgagcaaacaggaataaaaataacacaatttttatgtgtacaatatttgtggaatacgttactgaaccaaataaataatttagttaataacatgacaaggaacagaaattgtatacactatagagcatagtaatggaataatgaatgattaaagttattaatattcggtagaaaatgaagggtatctttgagagcagaactcaaggaagaaagcaattcgccttatgaggaaatagttacctgtggataaaggagaaactgaaaaatttacaagtcaagactttttgagcaaaaacaaaaatatgactattagtcaccaattcagtacaatgaaaaaaaatttgaagagacatcttggaagtaaaccatgttgtggaagagcatgtagggttttgataatcatgggatgattcttaattaattttaaattcgataggaatatatgagataatttcaccagagaatagcatgattgtgtttgcatttcaaaggggtgtatctggtgcactgtgtagaataaataggttatgtgagcaaataaattgggaggctactctaatccagagaaaaaaggtagtgacttaggtgagaatgctgtcatgatgagtggtagtagtggtgagaagtcgttaggccatggatgtatttcataggactggccaagagaactgcagctaaattggagtgtagggagtgaaatggagaactcaaagatgactctcagcactggaaggtgacagctgtcactgaagcatgctgatgcctcttattaagagagttacttgggaatggcaagatcaaaacttctcactttcaaatttataaaaaatattgttttcagaactaatgactttgggatcagtaagccaacattctaattgatggttacacgactacacgggctcacagtcccaagagcaaaagtaaatcatcacaaaggtgcttcttgttaattctagagaatggagaattactgtaacatctttctgattttaggagaggtagcagttccctttttagcctaaacgctattttttttaaagctcagccaagagactccattataattttcaaatgtgtgtaacttaaattctcatatgaaataccactatgcttaaattagtcaaaacattttccccatctacaactctatcttgtcattgcaatcattttcacaaaagtgactgcagctcacagaccctaaaaggagaaaatccagggtaggttatctgatctagttagtttcgaagacaggatctagagattatttaatatgaaataggtcacctgaaatgaagtgtttactgaaaacagcttggatcagcccagttttctaccactgaaccatgaatttggtttaaaaaacacaacaactctggggaatatcggctgcttctaactgtgttgaaggtgttaaagaaaagagcataacattaaaaatgatcacctgaggcctttatagtctctgctcaagaaactagagtcttccattcttaacgaaacaaccaaatatcttaataattgggcaaaatctaaatatcagagataattttatcttgaagattgttaaattataatggtgaatcactaccttgccatgtctctgagtcaaaaattaggtctttgtttaggaatcaatggtactctgcaacttggaaataggaagattttagaagactcagacattgactttcttgtgtgcaaaaaaaagacgtattgagataagacaagtctttccttgcaaggatacctctaatgctcatacaccacctcccctaacattaatatagcttccaggtcactaaccagtgtcagagaacagcccatgcaactagaaattcaaaagatgtcgaacatagggtcaagcctagaataagaagtcttagctaattaagtatgctttttttcccgaaattcatattaaccaaaacttggatatgtcagagaatgcattctaagttcactcaacctaggagggagaaagataattttaaattaagagctgaagcattcttgtcctaacagaaagcaaggaaaacgaaatatcacaccacaggagggatttcacaaattagtgtcaacatcaaaaccttaaaataggcaaggagaatgcagattcacaatgaactcttgtacttgttttgttcagagaagagatggttctgagagaatgacagtgaactaaccccagctggtttagttggtgctttcaactgctgcttctgatcaactcctttagctagaataattttggcatgtggtattagagatggttattaattttttcctcttatatgcattgttcaatgtagtaaatactagctgtatatggctacttcaattcaaattaattacaatgaaatatacttaaatattgaattttttagtcactgttggttcattattgaatatcttcagctaagatttcccatctaaagacattaagaggtggcttagttaactggtcgtccacaaatattgaagctgttgttaactcctgatagattctctgcaaagagaatattcatgagcctcctcctgaaatcagcagcctagagatagttttataaattggatacaagttggaaatctatatactctttaagtgtttgaaatattagcttcccagggaagaaaatcaaattcataagatatgttaggacaatttaactcaagatgttcaaaactgaaatgacatattctacaatatgtgataaaaccaccccctaacaacttaaagcaaaacagggattgaccttaaagacctgccttttcctcatcccccagcctatcagttttcaaatcttgcattttattttgaaaggtccttatccccctggtctcttgtttctagacttggcacatatttaagtttgttacctctctctactgacttttctctcttcaaacagtatctatgcctgtcaaatgtgaacatacaaaaaacaaatcagaatgtgccattctgatttaaactgcttattagttaataccctcaagataacatctgggttcttagctgcaatgagtcaagtttactttcatctttttttgtctttggctgcacatttcctatcacatcacactccagcaatgccaagctgcgccggccttctaccccatctccactattttgccctccgcggccgcggctttttgcccccgccgccgcggctttttgccccccccccccaccccgctgccgcggcttttcgcccctcgccgccgcggcatttcgccgcccgccaccgcggctttttgctccccctccgccgccacggctttttcccacccggccgccacggctttttccccccaacccgcctcggctttttacctgccgcgactttttgccccaccgctgccgcggcttttttcccccaccccgcctcggctttttgcccgccgtggctttttgcccccctgccttcgcggctttttgcccgccacggctttttgcccaccgccgccgcggctttttgccccgccaccgccgcggctttttgcccccccgctgtcagggcttttttctccgccgcggctttttcccccctgcccccgaggctttttacccgccgcagctttttgcccccaccccgcctcggcgttttgcccccaccccgcctcggctttttgcccgccacggctttttccccactgcggctttttagcccccgctgctgcggctttttgtcccccgccgccccgactttttgcccgccgcggctttttatcccccgccgccatggctttttgccccaccgcagcagcggctttttgcccccaccccgcctcggctttttgcccgccgcggctttttgcacccccgccgccgcagctttttgcccgctgcgggtttttgcgccccgccgccccggctttttgctcatcgccgaagcggctttttaccccccgccgcggctttttgccccctgccgccgcgactttttacccggggcggctttttgccccccgccgccgcggctttttgcccccccgctgtcacggctttttctccgctgcggctttttgcgcccccgccgcgtcgtctttttgctcccccgccgccgtggctttttgacgccgcggcttttttcccgctccggctttttgcccccccgctgccacggctttttgcccccccgctgccacggctttttgcccccccgccgccgcggctttttccgagccgcggctttttgcccctccgctgccacgggtttatgcccaccgcggcgttttgccccccatcgccgcggctttttgccctccgccgccgtggctttttgcgcgcctcggcttcttgccccaccgccgccgcggctttttgccccccgccgcgaatgaaaatgttcataaggtattttatttttttattttgataaaatacacataacataaaatgtactctgttaaccatttcaagtacagttcagtggtactaaatacagtcataacattgtgcagccatccctaccatccatctccataactcgtttcatcttgtgaaactgaaactctatacccattaaacaatacttcccaatttcttcctccccccagcttctggcaaccatcattgtactatctctgtgattctgtccactttaagtgccttatacaaatggaattatactgtatttgtccttcactgactaacttatttcacttggcataatatcctcaagtttcatccaagttgcaacatatgtcagaatatttccctcatgtttaagggctgaataatattccattgtatgtatatatcatattgtgcttatccattcatctgttgttggacacttcacttgcttctacattttagctactgcaaataatgctgctgcaaacatggatgtgcaaatattttttcaaggctctgctttcaattcttttgctatcctgagatgtggcgctgctgagtcatatggcaatatcattttgatgttttgaggaactaccatactcttttccacagcaaacatagggtttggcattccctccaaaactgcaaaaggaatcgccacatgcttgcctgtggattgtattcccaagtcttgtggctctctctacatcccggccaccatgtgttatttcctgtttatatatatgacatcaaaggtgcagaaagtaatgaactaaattagaaggataaacatgtagaaaaatagaggtaaatacggactacataaaagcataagaataagaattttggatgatctattatatacctatttatctaacatctatctgttcctccatctgtaattaaaatatattacagttagaggacagaggaaaaagtaggaatacatgaatttaaattttaattcttcttagattgtctcacagcatcattatatgaaagaaaatttataggtcaatatctgttaactataaatgtaacattcttaaagtattcaaatacattgaattacagcatgaataatatattacaatccagtcaagtttatttttttccaggaacacaaaaatacagatttcatttgcaattcaaaaaaaaacagaaatcgatacatatgtttgatatatatacacatttaatgtatttttaaatatacatttttaaaaaatagaaatttttctaggacaaataaaatatcactgaaaatagtgttattagctaataacttcatgataactctggtattacataagaaaccaaaattaaaattttaggtaaacttagaaactcaaaattttaaaaatattactctgttctccatatgttcatatttaatattatttcttgttttcattcttcttcagtgttgctctaccaaaatataacatacaatactaacttttgatttctgttcttattactcaaaattgtatacattttctcatgctcttcatttagttatgctacttttctgtactcttggaattttcacatttgtgttcactctcttttgagttcccatagtatcaaataagcttttttccctctttctgatttgaaggttcatcttctcataattattttgtccactcagtttcttttcattctcagttaagtgcctctcatctggcttcttttcattcataaggtttcctttcatcttaagccagtcttttatttatattttgacactgttttgtggaggacttgcttccctgaattttatggaagaggccaaaaggtttgttcaagtttttacctgatacattggattaaattatctaatgtacacacttttaatttaagtctaggagtgactgtctactcttgattttgtatggtattatttttcttaacatccaagtccatcttcatctatttgtatgtgatcaataaaaatatatttgtccagaaccctgctttggcggagttacttctttctaaatagtagaggtagcagttgagacatgagctgggttctgggtcagtttagagggctgggcgacattcctccttttggtctgtatgactgaatgaatgcagttcttgctgtctcgctcctgtccttaacacactgagccattgcagcagatgagaaggaataatcttgatctgccattcaggtggaacacatgttctctccaaccacacccataggttgtactcacactcggccagaatgtatcctgtcaatgatatggagatgtatctatctatctagatagatatctactttggtttatgctctctggttgcctgtaaattatctccttaaagtgaatatcaaaagagagcttggtgatggcagtgtaataaaatcctcaaaatgcagcacccacacccagaggaatttgtagattctggcattctaattcagataccaaactatataaaaggggaattggtcattgagggttgctaggctctttgttgagcatatttgctctttccatgactttgaaattattttaaaaatctaaccttttcctcggtgtgctgcaagatgatttgattttaatgcatatgcagtaattctcccctaagatttctacaatatatttgctctgacaagccatagccagcaactcacttcacagcaattcatagcatttccacgataagttgaattatttttaactagactctctttgccttaataaaaatatgaagaagcaatctacttgttctaattaggttcaaaagttgacagtctctctcctggaaagaataaaaaaacttttcaacggcctaatatgcatctatagacacacacacacacacacacacgcaggcactgttcataaaacttaaagcacattctgttctatgacttcatttgtctagcacaaaataaaacgatctcagtatatgtcaagtaccaattttttcgtatggccaattataggtattttattttttaaagattagagtgttcttgaagctctttctatttctttgtcaatgaactaaacattggcaaatatgtagggttgcccacataagaacattattaacatcaaaatagaaagctggcggtagaaataatgattgggaacatagagtctcttctcaacgttctagttctgtcataccataactttgtgatctcaggaaatatctctccatgttgtcatctctatgtatagttctgtcatttttcaataagagctttttgcttaattgtgaagtactagttactataaccattattttgagcttcatgtaaatcaagaacacatggactacacttgcaaaacactgaaaacgtagttagggattgggggcataaagcaacattttaaaatgtgtaaagacaatgagtaagcaacaaagtgtccaattttttaggggaaagttgcatatgtcaggagaaggcaggattaagtaacagagatttgaatgataactggccatttggtgtcatttacaattgcaagtcatacaaatgaagtttgcttttttaaagagaaaaggagttagttagaatgggtcaacctattggggaagcaatgtagttagagacaatgcccaaaaccatgtgagcaaatgctctgtagagcacacctctgcaatgctgccattgtgaggccaagtctctccttgtcttggtactgagctctccattctgcctccatcattgccactgtagctgccacaaaatgatccctcaaccaccgctgcccaggaacaaagaaagaattctgtccttccgcgctctcagatcaatttccaacagcaggtgacccttttatgggcactattcagttcccatatccatgaaatagatgcagtaaaaacatagaaattgcctatgtgtttcccaataagacacatatggaagcctgttttcccacaacaggaaggggtttgcacgatgggtgttcaaaggaacaatagtccctgtaaaccatatgaagaaaagcaataaggattatttagtaaatagacaaggaaactcatccagggttggctgatgagaagctggttagcaagggggtctgccttcagttaggacaaggtctgtgcttcccacgggttctctccacagcaggagggatgcaaacttccctttcctcccctgcacctaccctcaaatggcccagaggtcttcaggtgctagaatttctcaatgctgcacaaaataatagacagccttgactgtcacagtctctgctcattacataaaacaggagagtaagaacaagggtgtttaacgctaccctagctcaaacaagtttctctctgtaggatgccaagaacctgggaaccagtgcatctgctgctttcccttctcggattctagcccagacaaaagaggcaaggggcatttcttcagaggccttgagcttcactacacaatgaccgaggctctacatgcaccctctttatatatttctaccttgaaaaaaatttttatatattaataacatatatttttatgtaataaacacgtttattttatagatagatatagatatacatagataaagatctctagtcagccttttttaaggctgggctgatcgcggtgcctcaaaactataatcccagcactttgggaggccaaggtggccagatctcttgagtccaggagatggagatcagccagggcaacatggtgaaaccccatctttacaaaaattagctagcatggtgtcatgcacttgcagtccctgctactcaggagactgaggtggaagaatcgcttgagcacagtatgtgaaggcttcagtgaggtctgatcacatgactgcactccatcttgggtgacaaagtgagaccctgtctcaaaataaaataaaataaaaaggctaccaccatactcacagataagtgttcaggtatatttgcagctatctttcctatattctattaggtaaaaaaaaaattgcaaagaactcttctcattctagatttttgttttaattagacatttgaagtttatagcagaagagctataatcatgttttgtgtgtgtactctatagaccagatagtgcaaacagatatcaatgctttttaaaagtatataaggttattagaaatattttaaactacctataggtatatgtgcatgtaattgaactaccaaatgcaagtaagatcatttccttagcgtgtgaaatccactcaatttattaaaatattttctaacatctattacaatatttcttaattagctaaaataagaggagttttaagacatttatttatatgtacttacgagattcaaactcgattccactattttcagaaatcatactctgatacaagtcctttttttatctaactatgtttctgcctatattaaaagagatatatgtcaattttgctaatcatgctgttccaaacctctccatcctgattatttttcggtttgttctaccagtcactcagagacttacttatattcaaatttctctctaggtttaacatttgtctatgtcttcttgtggttttgtctatttttgctgtatataatttattttattgacatatatcatacatacagaaaagtacaatgattaaatatggatagcttgattaatgaaacacatgtatttgcttagaaccatgtatgaaaatagaacattactaaaagtagtgatatttttcctgcccctttccaaacactaaccctcatcctcaatagtaacagattttttttatcatacagtaatttggtctattttcaaatttttattaaataaatcagagtatctactctatgtttctttcattgttgttattttgcttatagtatttatctgctaatggacatggtagattaaagacggctacatacacattttttaattaataaattttttgaacactttgtggctcatgcctctaatcccatcacttttggaagctcagctgcttggatcatgaggtcaggagatcgagaccatcctggccaacgtggtaaaacccgttctctactaaaatacaaaaaattagctgatagactaacatcaagataacatctgggttcttagctgcactgagtcaagcctacttacatctttgtcttcctctgcacttttccttccacatcacactccaggaatgccaagctgtgctggccttctaccccatttccactattttgtcccggccgcagcgcgtttttgtggctttttgcccccgctaccgctgctttctgaccccgccgccgcgggtttttgccaccgcggctgtttacccccgctgccgcggcttgttgcccccgtcgcccaggctttttccgccgccgccgcgtctttttgcccccgacgccacggctttttacggctttttgcccccgtccccgcagctttttgccgccacgcctttttgcccccgtcgccactacggctttttgtcacccccgccgcggctttttgccaccccggctgtttgtccccaccgccgcgggtttttgccgccgcggctgtttgcccccactgccgcggcttgttgcccccgccgccgcggctttttgcccccgaagccgcaggtttttatggctttttgcccccgtcgcctctgcttgttgcccccgccgccgtggcttgttgcccccgccgccacggctttttgccgctgccgcgatttgctcccgccgacgcggctttttgcccccgccaccgcgggtttttgccgcctcggctgtttgcggcccctgctttttgcccccgctgccgtggctttttcccctgcggcctcggctttctgcccccgtcgccacagatttttgccgctgtggctttttaacccgccgccgcggcttttggtccccgctgccgaggctttttgccgaccctgctttttgtccccgcggctttctgcccccgcctccgccgctttttgccgctacgggtttttgcccccacagccacagttttttgccctcgccgccgcagatttttgcagctttttgtccccgccgccgcggctttttgcccccgccgctgcgactttttccgccgcggctttttgcagcttttggcccccgccgccgcggctttttgctccccccgccacggggtttggccgccggtgctttttgcgcccgccgcctcgggttttgccaacgcggctttttacgcccatcgccgcgcctttttgcttcccgcagcccctttttgtccccgccgccgcggctttttgcccccgccgccgaggctttttgccgtcgcggctttttcccccgccgccgctgctttttgcggcttttcacccccaccaccgcggctttttgctgcccgccgccgcccctttttgtccccgccgccgcggctttctgctcccgccgtcgcggttttctgcccctgccgccaaggttttttgcccccgccgccgctgctttttatggcttttcacccccgccgccggggatttttgcccccgccgccgccgccgccgccgccgccgccgcccctttttgttccggccgccgcggctatttgcccccgtcgccgcgggtttttgctcctcccatcttaggttttggccgccgtggctttttgaccccgccgccgcggctttttgcccccccgcccccaccgcgggttttggccgccgaggctttttggcccccggccgccgcggccttttgccgccggtttttcccccgccgtcgcggctttttgcagctttttgcccccgccgccatgggtttttgccgacgcagcttttgacaccccaccgccagggctttttgcgcccaccgccgcgtctttttgctcccgccagcgcggcattttgtccctgccgccgcagctttttgtccccgccgccacggcttttgcctacgcggctttttccccccgtcgcggctttttgtccccgccgccgctgcttttgcggctttttgcccccgccgcggcggctttttgctccccctgccgcgggttttggccgccggtgctttttgcgcctgccgccgcgggttttgccaaagcggctttttgcttcccgctgccgcccctttttgtcctcgtcgccgcggctttttgcgccccgccgccgaggctttttgccactgcggctttttgcccccgccgccgctgctttttgcggcttttcgcccccttggctttttacccccgcggccgccgcggctttttgcgccccggcgccgcggtttttgctgcccgccgccgcggatttttgcgcccgccaccgcggctttttgctccccgtcgccgcggctttctgcccacgccgtcgcggttttctgcccctgccgccgaggctttttgtccccgccgccgcggctttttgctccccgccgccgcggttttctgcccccgccgccgaggctttttgcccccgccgctgctttttgcagcttttcgcccccgccgccgcgggtttttgcccccgccgccgtggcttttgcccccgccgccgtggcttttgcccctgattccgcggtttttccccccgccgctgcggctttttgtggttttttgcccccgctcccgcggctttttgccagtgctgccgcgcctctttccccgccaccgctcctttctgcccccgcagccgcgcctttttccccccagccgccgctttttgccgccgcagctttttatccccgctgccgaggatttttacccccgccgccgcggcactgagggcgggagcggcagactcggccgccagctccactggcgtcctggcaagggcagcgccgaggggcgctcctggtccagctctcccagctcaggagtgtatgaatgctttgtgttctgacaaagagaatgtagcacccatgtcctacctgcttggttgcattgccggtgcccacggtagtccattttatccaggtttttaggttttgttgtgtttcgttttgtttttttcttttcaggagagttagtccaagaccaataactccataactggtagaattggaagactttaatagtgcttaacgttttgtacatagctttataagttttctttttctttttttctgattcttttcaatataccgcatcatggttgaactcaaactcattgcttatttaaaatctataactgctgacgttttgtaaccttcgcattccagataattggttttttgtgtattttctgttttttttctccatcagtctacctacatatttgttagatttaatattttaatatattactagcagttactccccatttcccccttttcccagcccctggcaaccattagtctattctctgtctctatagactagcatatgccaaatatcaaaaaaaaaaaaaatcatatgtgaccttttgtgtttggcttcttttatttaccatgttgtcctgattcatccatgttgtatcttgtgtcagcacttcattgctttatatgcctgaatcccattgcatgagtatactatgttttgtttatccattcattagttgatggatatttgagttgtgttcattttttgactatgattaataatgtactgtgatgagattcatgtactcgtttttgtgtggacgtatttttacaattttctttatatatctggtagtgggcatatggtaaatctatgtttaaatttttgaaaaactccaaaactgttttccaaagtctctgtaccattttatattattaccagcagtgtatggaggttccattttttcctacctccttgccaacatctgttattttcttttttaaaaaaatatagccatccttatagatgtgaagtggtatctagttttcacttgcgtatccttaatgactaatgatgttgagcatcttttcatgtgctgattggccatttgtatatctttttagagaaatgttcatttagattgtttgctcatttaattgggttgtctttttgttattctaagaattctttatatattctggacattagttcctcatcagatgtatgacttaatagatattttctctcattctgtgggttcttttcactttcctgatggtatcctctgaagtacaaaagttttgaattttgttaaagtccagtttgttttttccttttgtcactcttgcatttagtgttgtatctaagacccattgcctaattcatggtcacagatttatacctatgttttcttctacaaattttatagttttaccccttatatttgggtctttgatcctgatagtgttttttttggtgaacagaatttgtttaggctttatatgaaaacccactggggctattaaggtagttttactatattatctttagaagttttatggttttgcttctcatcttattcttaatccactggaaactacatgttgtatagtcagtgttcatttatatttactcacattatttgtcttcttaagtactcaccatttcttctcgcaactcaagtcttccatctaggggaacacccttctactgaaaaacatctcttagaatttcctttagtgaaggtctcttagttagcaaatttagtattagtttggtttttatgacttaaatattgtcttatatttggcctgtttattacaagatatattaatttcatatgtgattattttttcttagtacattgtcttcttgcttccatttttaagacattagctcttggtctaaatccatattctttcatggataatgtgaattttttctctggttgttttcaatatattcttttcttcagggttccgttatttttatgatgatacatttaagtatttttttccttttaaatctgtccaacttgagtttcctgaatatgaagggtggaatttttcatcactttgggaaaattccaagccattatcttttttacaaaacctttctaacagtttattgttctacttatgaaatcctgttagttgtaacatcttatcactcttgtcttccatgtctcttgtttctttcttattttttacttctttgggcttcattctgagcaatttcttcagcctgtcttccagtttatattttccttttcaattatatgtaatctgctgtcaaatctgtcttcaatttcaacaattatgtttttatttctggaatttctgtttggatccttctcaaatctgcctggtcattttttaaatttttttttttttgctttcattgagttgtattaaaattttattatatgcccaacaattctaattaagtctttattggtttgattttgctgagtctcttttcttttgtctttattttctttacttgtacaatgttaataatctagtaataacaccaactaaatcacatgattgttttaagaattgagataatgaatatattgcataatatctggtacatagcaaatgtacatgcaatccattataataattagaaataatgaaatataatgtatgattattaggaaatgtaccagagccacaaattttattgagcgatataaaagacaactagagaaaacaaagaaatgtgccatagctggattgaaacagtaataataatgtgtgttcatcttagactaaatcatgtctcatacaatttcaataaaattccaattaaatttatttttaaaacgtggcaaatacattgtaaattaaatgtaaaagaacaaacagggccaggctcagtggctcaacctgtaatcccagcattttgggaggctgaggcgggcatatcatgagatcaggagatcgagaccatcctggctaacacggtgaaaccccttctctactataatacaaaaaattagccgggcgtggttgcaggcgcctgtagtcccagctactcagcagtctgaggcaggagaatggcgtgaacccaggaggaggagcttgtggtgagtgaagatcataccactgcactccagcttgggcgacagagagagattccatctcaaaaataaaataaactaaaatataaaaagaaaaagaatttgtgtcttgtttcctcattaatgttggttgaaagcatgtttgcacttgtctttgacttgtgttttattaacatcgattggcatattaaaagtccctctgagcttaccttgtctaaaaaaatgtaagaagaaggactatgaggcagaggggctggtgtgagcacatgctgggcaggaggaaagaggtaatgatcaggaccagggaaatccccaaacccagcaagtcagggagccaaatgaaagcctttcatcctgtatcggccacctaaccccatcgacactcaaagtgagcattctctcttagagatactcattgtcctgttttttctgtaaccttgcaaaggaatctgatttctcccattagcctttcacaggacaaaaatttcatattagaatgctattctttagaaggcatctcagattaggctgcaaggagattgaggaagttactgtcagtcacttataccccacagggacattaattcaccagagctttggtgggggagtagaggagctcattacaagcaggtctggatgctgcacagagtgtaaagggggcagaaggatccaggacacctaggcctggagatagtgccaatgctgggaggtaccattattatccccattttacagaggaggaaacagacactggcaggtaatgtgatcaagaccatgctgtcctgcagtacaggagccaggatctaaaccaaggcagcctgccttgccatcagcgctatcacccataacctcgtgctgcctttaagcaggattgccctgtggccaggggcacagcttctgggttcacattccagcttctctacaatttccagctgtgtgaccttgggcaagttacttgtctgtgctcagcgtcctctgcacagtgggtatagcaatacctgcctcatggagtcctttgagttaatcactgtaacatgcttagaatggtgccatgcgcatcgtcaccatgcagtacatatgggccatcatgcctgaatcccggatagattaaaagtccctctgagcttaacttctctaaaaaaatgtaagaaaaagggcctgtgggaaggactatgaggcagaggggctggtgtgagcacatgctgggcaggatgaaagaggtaatgaccaggaccattgaagggtctaaaatgaccagtatccttgaagagtctaaaatctaggatcctgaaatgcctggcagtgggatcctgaaatcctctggcagcattttaacatattttggctgcagaattgtaccctgcttcccggggctagaaggtgtgggatcagctgcttactcagttcagccccaaagtaggcaaagaaggttttgtcacaggcttgtctagggcccagcccctgtaacctccccttgtccctcccttgcatgctccctcacccatattcacacatgaactccaggcattctgggccccaagggaaggagagagggtggggagtgggttcactggtctaccgaagcatgctgccttcagcccagctgaactgctgggtccagggaatgggcctgcagctgaaggggtcttgccccccctttaactttaaactttgatttgcagtgatccaagagcttcatctcttcctgtgatcctgtctggatgtttatgctggatggcacgggccccttctggcaggggtgcacaggccagggcatggctggcagccatggcaggtaaggagaccttggcagatgagaagaccttctgcttcagcttcaatgtatgggtcttctcctggctctcagtacattcctcctgagccatgatgggccccagttcaatgaaaccttctgcggcagcatcatggtgtccaggggtataatctggagcaagtgccagtgctaccccaagataggtggttgtggggctgagtgaagcccaaagggctggatcttgtacctctcttccacgtatctgcttcaaccttcaatcatcttgttattttcattttgactcccgttttattctgtcttctcttctgagcacccatccattcatttatccattcatccatctattcaaccatccattcatcccagcatcaatctatcaatctatgcatccatccatttatttgtccaaccacccatccatctatctgtccatcatttagcataaggattgatcagaagcctcctggttctggagccatagaccagacaccatggggagacatgatgaaaaacaacatatgatttgtgtgcttgaaacaaaagctaatgagtgcttaccacctgcctggcagtcctgcattcagggtgcagttctcccctcatcctgagctttttggtaccttctgtagtttcattttgtactagagaatgctgagcctcataaagtgggatcacacagctgtgtagtggagtttggattggagctcagatgtgtgtgacttaggcatcatcctctaccttgagtcctccactccagggtcccagagctgctgagcattctggggttggtcagctctaactttggtggcatgcattgagcaactctccatattttggagtcttaatgtattcctagccttagtgatggcaaggaccctgctttgggagacctgggttctagttccagtcctgtcccaaactttctgtgtgatctttgtctttctgagtccagtatttgcatctgcgtaataggacacaagcaccaactttcacagcctcatagggctattacagaggtcagagaagagaagagatatacaaatatttgtagactgtagagtgttttgtttaggtgaagggctgtcaggtcctgacaaccctctggaatgaacatgtcagaagttgtaaaccttcaatgcccagagaggtggagtgactcttccaaggtcacatatctagtcagagacagaccaaggggaaaaaaatgagagaaaaatggaatctaacttgggctctgtctctaactgcctgggagactgctcaagccccttcactctctaggcctcagtttccttgtttttacaatatgtgagacaggatgaggggatggatggggaggatatctggaggccttgctagaactcacctctaaggcccaggcttgggaatccccagaacccccatattgtcctttacacctggatggctgtgctcaagggctcagggaggggggactcttgtggacctggactccctagcccttcccattctgtgggcccaccttgtgatgtcagcatgttaggtgctggaatggtctcagcaggtttgcagtcatttccgaagaagtttatggtaacctcacctctgtctgcaccatgtcctgggcagaggtccccgggagaagtcctggaggccagagctacccatgtcaccaccagccatggcagtcctcttccccatgaggaggctgcaccctgggagatggcatcgggtggaacgggacatctgtcctgacctcccaattaggcagaggtggctgtgggactgtgggcagggatactggagtggcagtgggaaacgaagtggaggaggaaatattgctgggtactaatagaatagaatgtaatggatttcaatgtatttgactagaatgaaatagaatcgaatggaatgtaatccaatagaatggaatggaatgaaatgcaatggaatagaatgcaatgcaatggaacggaatgtagtggaatcgggtggaatggaattgaatggaatggactggaatggaatggactcgaatggaatgcactggagtggattgtattcgaatgaaatggaaacgaaaggaatggaatggaatggaaaggaatagaatggaatggaattggatggactggagtcgaatggaatagaatcgaatggaatggcatcaaatggaatggaatctaatggaatgtacttgaatggaatggactcgaatggaatagaattgaatggaatggcattgaatgaaatggaatggaatggaatgaaatggacacaaatgtaatggactcgaatggaatggactcaaatagaatggaattgaaagaaatggtctcgaatggaatttattcgaatagaatggaatcgaatggaatgcaatagtatggaatggaatcgaatggaatggaatcgaatggaatggaccggaatggaatggactggaatagaatggagtcgaatgtaatggattgcaatgtaattgattcgaatggaatcgaatcgaatggaacggaatcgaatggaatggaccaaaatggaatggactggaatagaatggaatcgaatgtagtggattgcagtgtaattgatttgaaaggaatggaatcgaatggaatgtaatcaaatggaaaggaattgaatgaaatggaatggaataaaatggaatgcaatggaatggaacagagcggaatcgagtggaatggaatcgaatggaatggactggaacagaatggactcgaatggaatggaatggaacaaaacggaatcaaacggaatggaattgaatggaacggaacggaacggaatggaatggaatggaatggaatggaatggactcgaatggaatggagttgaatggagtggaatcaaatggaatggaatcaaatagaaggcaattgaatagaatcgaaaggaatagaatggaatggagaataatggaaagatatcgaatggaatgtaatgtaatggaaacaaatagaatgcgattgaatagaatcgaatggaatagaatagaatgcagtataatagaaagatactgaatgtaatgtaatgtaatggaatcaaatggaatggactggaatggaatggactcgaatgcaatggactggagtggaatggaatgaaatcgaatggaacggaatcgaatggaatggaattgaatagaatcaaaaggaatagaatggaatggagtgtaatggaaagatatcgaatggaatggaatggaatggactcaaatggaattgactggaatggaatggactcgaatggaatggaatgcagtcgaatggaatagaatcgaatggaatggaatcgaatagaatggaattgaatagaaacgaagggaatagaaaggaatggagtgtcaaggaaagttatcgaatggaatggattggaatggaatggactcgaaaggaatggactggaatggactgcagtggaatggacgcgaatggaatgaaaacaaatggaatggaaaggaatggaatagaatgaaatggaatggaatggaatggaatggaatggaaaggaatagaatggaatggaatggaattggatggaacagagtggaacggaatggagtcgaatggaacagaaatgaatgaaatggcatagaatggaattgaatggaatggaattgactcaaaaggaatgcaatcgaatggaatagagtagaatggattggcatcgaatggaatggagcagaatggaatggaatggaatggaatggaatggaatggaatggacccaaatgtaatggactcgaatggaacagactgaaatagaatggactcgaaaggaatggtgtcgaatggaatttattcgaatagaatgaaactgaatggaatgaaatagattggaatggaatcgaatggaatggacgagaatggaatggactggaatagaacggactggaatttaatggattacaatgtaattaaatcgaatggaatggaaccgaatggaatgtaatcaaatgcaatggaatggaatagaatagaatggaatgcaatggaatggaacggagaggaatcgataggaatggaatcgaatggaatggaatcgaatggaatggactggaatggaatggactcgaatggagtggactggaataaaatggaattgaacggattggaatggaatggaacggaatgcaatataatgcaatggaatggactcgaatggaatgcagtcgaatggaatggaaccgaatggaatggaattgaatggaatcaaaagactagaatggaatggagtgtaatggaaagatatcaaatgtaatggaatggaatggactcaaatggaatgaactgcaatggaacggacttgattggaatggactggagtggaatggacttgaatggaatgaaatgaaaaggactggaatggaaaggaaaggaagagaatggaatgaaatcggatggaacggaatggaatggaatggagtcaaatggaatagagtcgaatgaaatgacattgaatggaatggaaaggaatggaaacgacccgaatggaattgaaaagaatggaatggaatggaaaggaacagaatggaatggaatggaatgaaaaggaatggaatggaatggaagggaacacaatggaatggaatcagatggaatggaatggaatggaatggaatggaatggaatggaatggagtcaaatggaatagaatcaaacggaacggcatcgaatggaatggaatggaatataatggaatagaatggactcgaatggaatggattcgagtggaatagaataggatggaatggcattgaattgaatggaatggacccaaatgtaatggactcgaatggaatggactcaaatagaatgcacttgaaaggaatggtctcgaatgggattcattcgaatggaatggaatcaaaaggaatgcaatagtatggaatggaatcgaatggaatggaccagaatagaatggactagaatgtactggattgcaaattgattgattcgaatggaatggaatcgaatggacagtaagcaaattgaatgcaatgcaatgcaatgcaatggaatagaatggaatgcaatgcaatggaatggattggaatcgagtggaatggaatcgaatggaatggactcgaacggaatggactggaacaaaatggaatagaacggactggaatggaatggaaaggaatggaatggagtgcaatggaatggactcgaatggaatggagtcgaatggaatggaaccaaatggaatgtaatttaatggaattgaaaagaatagaatggaatggaatggaatggaaagatattgaatgtaatggaatgtaatggactcaaatggaatggaatggaaaggaatggaatcgaatgtaatggactggagtgggatagactcaaatggaataaaaacgaatggaatggaaaggaatggaatggaatggaaaggaatagaatggaatgaaattggatggaattgaatggaatggattcaaatggaataaaatcgaatggaatggcattgaatggaatggaatggaatggaatggaatggaacgcaatggactcaaatggaatggaaacgaatggaatggaatgcaatggcatgggatgcaatggaatggaatggagtcaaatggaataaaatcgaatggaacggcatcgaatggaatggaatggaatggaatggagtggaatggactcgaatggaatggattcgaatgcaatagaatagaatggaatgccatcgaatggattggaatggaatggaatggacgcaaatgtaatggactcgaatggaatggactcaaatagaatgcactcgaaaggaatggtctcgaatggaatttatttgaatagaatggaatcgaatggaatgcaatagtatggaatggaatcgaatggaatgcaccagaatggaatggactggaataaaacggacttgaatgtaatggtttgcaatgtaattgattcgaatggaatggaatggaatgcaatggaatggactggaacagaacggactcgaatgtaagggattgcaatgtaattggtttgaatggaatggaatcaaatggaatgtaatccaatggaacggaatggaattgaatgcaatggaatggaatagatgcaatgcaatggaatggaacggagtggaatcgagtggaatggaattgaatggagtgggatcaaatggaatggaatcaaatggaatagactggaatggaatgcactcgaatggaatggactggaaaataatggaatcgaacagtttggaaacaaacagaatggaaagcaatgacatggaagggactcgaatggaaaggagtcaagtgtaatggaatcaaatggaatgggattcaatggaatcgaaaggaatagaacggaatggagtgtaatggaaagatatagaatggaatggaatggaatggactggactggaatagagcggactcgaatggattgcactggagaggaatggaatcgaatgaatggaaaagaatggaatggaatggaatggaatggaatggaatggaaaggaatagaatggaatggaatcggacggaacggaatggaacgaaatggaatggtatggagttgaatggaatagaatcgaatggaatggcatcgaatggaatggatccaaatgttatggactcgaatggaatggactcaaagagaatggtctcgaaaggaatggtttcaaatggaatttatttcaacagaatggaatcgaatggaatgcaatagaatggaatggaatggaattgaatggaatggaccagagtggaatggactggaatagaatggactggaatgtaatggattgaaatgtaattgatttgaatggaatggaatcaaatggaatggaatcaaatggaatgaaatggaatgcaatcgaatggaatagaatgcaacacaatggaatctaacggattggaagcgagtggaatggaatcgaatggaatgaaatcaaatggaatggagtcaaaaggaatggactggaacaaaatggaatagaatggataggaatcgaacggaaaggaatggaatggaatgaaaaggaatggagtcaaatagaatggaatcgaaaggaatggaattcaatggaattgaattgaattgaatcgaaaggaatagaatggaatggagtgtcatagaaacatatcaaatggaatggaatggaatggactcgaatggaatggacaggaatggaatggactcgatggaatggaacggaggggaatggacttgaatggactggaaacgaatgaaatggaatagaatgcaatggaatggaatggaaaggaagagaatggaatgcaatcagaaggaatggaatggaagggagtggagtggaaagcaatagaattgaaaggaatcgcattgaatggtatggaatggaatggactctaatggaatggactcgaatggagtggcatcgaatggaatagagtggaatggaatggaatggaatggaatggaatggtcccaaaagtaatggactcgaatgaaaaggactcaaatagaatggattcgaaagcaatggtctcgaatggaatttatccaaatagaatggaatcgaaaggaatgcaatagtatggaatggaatcgaatgaaatggaatcgaatggaatggattggaatggaatggactggaataatacggactcgaatgtaatggattgcaatgtaattgattcgaatggaattgaattgagtggaatgtaatcaaatggaatcgaatggagtgcaatggaatggaatacaatggaatgcaatggaatggaaaagaacggagtggaatcgagtggaatggaatcgaatggaatggaatcaaatgaaatggaatcaataaaatggacgtgggacaaaacggaatcaaacggattggaatagaacggaacagaatggaatggagggtaatggactcgaatggaatggagtcgaatggaatggaatggaatggaatggaatggaatggaatggaatggagtgtagtagaaagatatcgaatggaatggaatgaaatggaatggactggaatggaatggaatggagtggaatggaaacgaatggaatggaatgaaaggaatagaatggaataaaatcggatggaatggaatggaatggaatggtgtcgaatggagtagaatcgaatggaacggcatcagatggaattgaatggaatggaatggactcgaatggaatggaatcgaatagaatataaatgaacggaatggcatcaaatggaatggaatggaatggcatggaattgaatggacccaaatgtaatggacctaaatggaatggactcaaagagaatggactggaaacgaacggtctcgaaaggaattcattcaaatagattcgaatcgtattgaatgaaatagtttggaagggaatcaaatggaatggaattgaatggaatggagcagaaaagaagggactggaatagaacggactcaaatgtaatggattgcaatgtaatagatttgcatggattggaaaggaatggaatataatcgaatggaaaggaatggaatgcaatggaatggaatagaacggaatgcaatagaatggaacagagtggaatcgagaggaatggaatcgaatggaatggaattgactggaaaaaaaggaaatgaaaggattggatttgaacggaacagaatggaaaggaatggaatggaacatacttgaatggaatggaatatactcgaatggaatgcagtcaaatggagtggaatcgaatagatggaaatgaatggaattgaaagcagtagaatggaatggacggtaagggaaacatatcaaatggaatgaatggcatagaatggactcgaatggaatggaatggaatggggcggactcgaatggaatgcactggagtggaatggactcgaatggaatggaaacgaatggaatggaatggaatggaacggaaaggaatagaatggaatggaatcggatggaacggaatggattggaatgcagtcaaatggaatacaaccgaatggaatggcatcaaatagaatggaatgcaatggaatggagtggactcgaatagaatggactcaaatggaataaaatcaaatggaatggtatcgaatggaatggaatttaatggaatggacacaaatgtaatggactcacatggaaatgactcaaatagaatggaatagaaagaaatggtctcaaatggaaattatgtgagtagaatggaatcgaatggaattcaacagtatggaatggaatcgaatgcaatggaatcaattcgaatggactggaataaaacggagtcgaatgcaatggattgcaatgtaattgattcgaataaaaaggaatcgaatggaatggaaacgaatggaatggaccggaatggaatggacacgaatagaccggactcgaatgtaatggattgcaatgtaattgatttgaatggaatggaatcgatgggaatgtaatccaattgattggaatggaaatcaatggaatggaatagaatgcaatgcaatggaatggaatggagtggattcgactagaatggaatcgaatggaatcgaattgaatggaatgggatcgaatggaatggattggaacacaatggaatggaacggattggaatcaaacggaacggaatggaatggaatggaatggactcgaatggaatggagtcgaatggaatggaaccgaatggaatggaatcgaatggaatggaactgaatggaatcgaaaggaatagaatggaatggagtgcaatgtaaagaaatcaaatggaatggaatggactcgaatggaatggaatggaatggacaggaaaggaatggactggagtggaaaggacttgaagggaatggtctggagaggaacagacacgaatggaatggaaacaaatggaatggaatagaatggaatggaatggaaaggaatagcctggaataaaatgggatggaacggatttgaatggaatggaatggaatggagtcaaatggaatagaatcgaatggaatggcgtcgaacgaaatggaatggaatggactcgaatggaatggactagagtggaatagaatagaatggaatgcaatcaaattgaatggaatggaatggactggaatggaatggaatggaatggacccaaaggtaatggactcgaatggaatggactcaaatagaatgaactcgaaaggaatagtctcgaatggaatttattcgaatagaattgaatcgaatggaatgaaatagtatggagtggaatagaattgtatggaccagaatagaatggactggaatagattggacttggatctaatggattgcaatgtgattgattcgaatggaatggaatcaaatggaaagtaatcaaatggaatggaatggaatgcaaaggaatggaatagaatggaatgcaatggaatggaacagaacggagtggaatcgagtggaatggaatcgaattgaatggaatcgaatggaatggacgtgaatggaatcgacatgggacaaaaaggaatcgaacggattggaatcgaattggaatgaatgaaattgaatggaatggacctgaatggaatggagtcaaatggaatgggatctaatggaatggaatcaaatggaatggaattgaatggaatggaattgaaaggaatggagtataatggaaagttatcgaatggaatttaatggaatggactcgaatggaatggactggaatggaatggactagaatggaatggaatggagtggaatggactcgaatgaaatggactcgagtggaatggactcgaatggaatggaaacgacttgaatggaatggaaaataatataatgcaatggaatcggatggaacggaatggaatgttacagagttgaaagaaatagagtcgaatggaatggcatcaaatggaatggaatggaatggagtggaatggactcgaatggaatggattcgaatgggatagaatagattggaatgccattgaatggattggaatggaatggaatggacccaaatgtaatggactcaaatggaatggactcaaatagaatggacttgaaaggaatgggctcgaatggaattctttcgaacagaatcgaatcgaatggaatgcagcagtattgaatggaatcgaatggaatgggctcgaatggaattctttcgaacagaatcgaatcgaatggaatgcagcagtattgaatggaatcgaatggaatggaattgaatggaatggaccggaatggaatggactggaatagaacagactcgaatgtaatggattgtaatgtaattgattcgaatggaaaggaatcgaggggaatttaatccaatggaatggaatggaaaccaatggaatgcaatagaatgcaatgcaatggaatggaattgaggggaatcgcatggaatggaatcgaatggaatggaattgaattgaatggaatagaatggaatggactcgaatggaatggactcaaatggaatggactgaaataaaatggattggaacggattggaatcgaacggaatggaaaggagaggaatggattggaatggactcaaatggaatggaaaggaatggattggaatggactcaaatggaatggagtcgaacagaatggaactgaatagaatgctatctaatggaatggaatgaatggaattgaaaggaatacaatggaatggggtgcaaaggaaatttaacgaatggaatggaattgaatggaatggacaggaatggacttgaatggaatggactggagtggaatggacttgaatggaatgggctggagtggaatggactcgaaggaaattgaaacgaatggaatggaatggaaaggaatagactggaatggaatgggatggaacgcaaaggaatggaatggaatggagtcgaatggaatagaatcgaatggaatggcatcaaatggaatggaatggaatggactcgaatagaatggaatcgaatggaatagaatcaaaatgaatggcatcaaatggaatgaaattgaatgaaatggaatggaatggacccaaatgtaacggaatcgcatagaatgcactcaaatagaatggactcaaaaggaatggtcttgaatggaatttattagaatagaatgaaatcgaatggaatcaaatagtattgaatggaatcgaatggaatggaatcgaattgaatggaccggaatggaatggactgtaatagactggactcgaatgtaatggactgcaatgtgattgatgtgaatggaatggaatcgaatggaatgtaatcaaatggaatggaatggaatcgaatggaatgccatgtaatgtaatggaacggagtggaattgagtggaatggaattgaatggagtagaaatgaatggaatggaattgaatgcaatggattcgaatggaatggacttggtacaaagtggaatcgaaaggatgggaatccaatggaatggaatgaaatggtatgaaatggaatagactcaaatggaatggagtcgaatggaatggacttgaatgtaatggagttgaatggagtggaatggaatggaatggaattcagtggaacagagcacgatggaaagatatcaaatggaatggaatggaatggactcgaatggaatggactggaatggaatggactagaatggaatggacaggagtggaatggactcgagtggaatggactcgtatggaatggaaacaaatggaatggaatggaaagaattataatggaagggaatcggattgaacggaatggaatgtaatggagtcaaaaggaatagaatcgaatggaatggcatcaaatggaatggaatggaatggagtggaatggattcgaatggaatagaatagaatggaattccgtcgaatggattggaatggaatgaaatggaatggacccaaatgtaatggactcaaacggaatgcattcaaatagaatggactcgaatagaattcattcaaatagaatcatattgaatggaatgcagtagtattgaatggaatcaaatggaatggagttgaatggaatggaccagaatcgaatggaatggagttgaatggaatggactggaatagagcggactcgaatgtaatggattgcaatgtaattgattcgaatgaaatggaatgtaatacaatggaatggaatggaaaccaatggaatgcaatagaatgcaatgcaatggaatggaatggagtggaatcgggtggaatggaatcgaatggaatggaattgaatggtatggaattgaatggaattgactggaatggaatggactggaacaaaatggattggaaaggattggaatctaatggaaaggaatggagtggaatggactggaatggactcaaatggaatggagtcgaatggaatggaaccgaatggaatgcaatcgaatggaatcgaaaggaacagaatggaatggagtgcaatggaaagttatcgaatggaatggaattgaatggaatggactcaaatggaatggactggagtggaatggaattgattagaatgggttggactggaatggattcgaatttaatggaatggaaagaaatagactggaatggaatgggatggaacggaatggaatggaagggaatggaatggaatggagtcaaatggaatagaatcgagtggaatggcatcaaatggaatggaatgcaatggattcgaaaggaatggactcgaatggaatagaatcgaaaggaatggcatcgaatggaatgttattgaatgaaatggaatggaatggacccaaatgtaatggactcgaatggaatggactcaaagagaatggactcgaaaggaatggtctcgaatggaatttattcgaatcgaatggaatgaaatagtatggaatggaatggaatggaatggaatggaatggaatggaatagaaaggactcgaatgtaatggaatgcaatgtgattgattcgaatgtaatggaatcgaatcgaatgtaatcaaatggaatggaatggaaggaaaaagaatggaatagaatggaatgcaatgtaatggaatggaacggagtggaattgagtggaatggaaaagaatggaatggaatcgaatggaatggattcgaatgtaatggacttgggacaaaatggaatcaaatggattggaatcgaacggaacggaatgaaatggtttggaatggaatggactcgaatggaatggagtcgaatggaatggactggagtggaaaggactcaaatgtaatgtaaacgaatggaatggaaaggaatagaatggaatggaatcggatggaatggaatggaatggaatggaatggaatggaatggaatggagtagaatggaaaagagtcgaatggaatggcttcgaatggaatggaatggaatgtactcaaatggaatggactcgaatggaatagaatcaaatggaatggtatcaaatggaatggaatggaatggaatcgaatggagtggatgcaaatgtaatggacttgaatggaatggactcaaatagaatagaatcgaaaggaatggtctcgaatggaattaattcaaataaaatggaatcgaatggaatgcaatagtatggaatggattcgaatggaatggaatcgaaaggaatggaccagaatggaatggaatagaatagaacagactcgaatggaatggattgcaaagtaattgattcgaatgtaatagaattgaattgaatgtattcaaatggaacagaatggaatgcaatggaatggaatagaatggaatgcaaaggaatggaatggagtggaatcgagtagaatggaatcgaatggattggaattgaattgaatggactggaatggaatagactcgaatggactagactggaacaaaattgaatcgaacagattggaatcgaaaggaaaggaatggaatggaatagaatcgaatagaatggagtcgaatggaatgaaattgaattcaatgaagtcgaatgaaatggaattgaatggaatccaaaggaatagaatagaatggagtctaatggaaagatattgaatataatggaaaagagtggatgcgaatagaatggactggaatggaatggactcgaatggaatggactggagtggaatggactcaaatggaacggaaacaaatggaatggaaaggaatggaatggaatggagtagaatggaaaagaatcgaatggaatggcatagaatggaatggaatggaatgggctcgaatggaatggaaccgaatggaaaagaatacaatggaatggcatcgaattgaatggaaaggaatggattggaatggaatggaatggtcccaaaggtaatgggctcgaacggaatggactcaaatataatggactcaaaaggaatggtctcaaatggaatttattcgaatagaattgaatcgaatggaatgcaacagtatgcaatggaatcgaatgaaatggaatcgaacggaatggacaagaacagcatggactggaatagaacggactcgaatgtaatggattgcaatgtaattgatttgaatggaatggaatcgaatggaatgtaatcaaatggaatggaatggaatgcaatggaaaggaatagaatggaatgcaatggaatgaaatggagtggaatcgagtggaatggaatcgaatggaatggaattaaatcaaatggaatcgaatggtatggacctgaatggaatggactcgaaaggaatggactggaacaaaatggaatcgaacgaattggagtctaatggaacggaaaggaatggaatggaattgaatggaatggaatggaatttaatgaaatggaatggaatggactcaaaacgaaagtagttgaatggaatggaatcgaatgaaatggaatcaaatggaatggaattgaatggaatggagtgtaatggaaagatatagaatggaatggaatggaatggaatggaattgaatagaatgcactggaatggaatggacacgaatggaatggactggaatgaaatagactcgaatgtaattgactgcagtggaatagactcaaatggaatggaaacgaatggaatggaagggaatagaatgggaaagaacagaatttaatggaatcggaatggaatggaatcggaagaaatggaatgtaaagtagacgaatggaatagaatcgaatggaatggcatcgaatggaatggaatggaatggattcgaatggaatggactcgaatggagcagaatcgaatggaatgacatcgaatggaacgcaaaggaatggaatggacccaaatgtaatggactctaatggaatggattcaaatagaatggacttggaaggaacggtctcgaatggaatttattcgaatagaatggaatcgaatggaatgccatagtatggaatggaatcaaatagtatgtaatcgaatttaatggactggaatggaatacgctggaatagaatgcactcgaatgtaatggattgctatgtaattgattcgaatggattggaatcaattggaatgtaatcaagtggaatggaatggaatgcaatggaatggaatagaacggaattcaatggaaaggaaaggagtggaatcaagtggaatggaatcaaatggaatggaattgaatgggatggaatcgaatggaatttactggaatggaatggactcgaatggaatgaactggaacaaaatgggaccaaagggattggaatcgaatggaaaggaaaggaatggcatggaatggacttgaatggaatgcattcgaatggaatggaaccgaatggaatggagtcgaatgggattgaaccgaatggaatggaattgaatggaattgaaatgaatggaatcgaaaggaagagaatggaatggagtgtaatggaatatcaaacggaatggaattgaatgaactcgaatggattggactggaatggaatggactcgaatggaatggactggagtggaatggattaaatggaatggaaaagaaaggaatgcaatggaatggaaagtaaaggaatggaatggaatggagtggaatggaagagaatcgaatggaacggctttgaatgcaatggagtggaatggaatgaaatggaatggactcgaatggaatggacagtaatgaaatagaatagaatggaatgacatcgaatggaatggaatggaatggaatggacccaaatgcaatggactcgaatggattggaatcaaacaaaatggactcgaaaggaaaggtctcgaatggaatatatttgaatagaatggattcgaacgaaatacaatagtatggagtggcattgaatggaatggaattgaatggaatggaccggaatggagtggactggaatagaatgaactcgaatgtaatggattgcaatgtatttgattcaaatggaatggaatcgaatggaatgtaatcaaatggaatagaatggaatgcaatagaatggaatagaatggaatgcaatggaatgtaacagagtggaatcaattggaatggaataaaatgaaatggaatcgaatggaatggaatcaaatggaatggataggaatggaatggactcgaatagaatgtattggcacaaaatggaatcgaagggattggaatcgaatggaacagaatggaatggagtggacagtagtggcatcgactggaatggagtcgaatggaatggcatcaaacggagtggactggaatggaatggaatggaatggacgcgaatggaatggaatcaaatagaatataatcgaatgtaatggaatcgagtggaatggaatggaatggtatggaatggaatggacccaagtgtaatggactcgaatggaatggactcaaagagaatggactcgtatggaatggtctcgaatggaatataatcaaatagaatgtaatcgaatggaatgtagtagtatggaacggaatcaaatggaatggaccagaatggaatggactcgaatagaacggactccaatgtaatggaatgcaatgtaattgatacgaatggaatgaaatataatggaatgtaatcaaatggaatggaatggaatgcaatggaatggaatagaatggaatgcaatggaatggaccggagtggaatcgagtagaatggaatcgaatggaatggaattaaagggaatggaatggaatggattgcaatggactcgaatggaatggagaagaatggaatggaatctaatggaatggattggaatggaatggaattgaatggaatcaaaaggaatagaatggaatggagtgtaatggaaagctatcaaatggaatggaatggaatggaatggaatcaaatggaatggattcgaatggaatggactggagtggaatagactcgaatggaatggagtcgaatggaatggaatcgattgcaatggaatcgaatggaatggaattgaatggaatctaaaggaatagaatggaatggagtgtaatgggaaaatatcgaatggaatggaatggactcgaaaggaatggactggaatggaatggactcgaatggaatggactggagtggaatggactcaaatacaatggaagcaaatggaatggaatggaatggaaaggaatagaatgaaatggaataggttggaacggaatggaatagaatggagtcaaatgaaatagaatcgattggaaggtcatcaactggactggaatggaatgaactcgaatagaattgactggaaaaaaatggaatcgaacggattggaatcgaagggaaaggaatggaatggaatggacccaaatgtaatggactcgaatggaatggacccaaatagaatggactcgaaaggaatggttatgaatggaatttattcaaacagaatggaatcgaatggaatgcaaaagcatagaatggaattgaatggaatggacgggaatggaatggactcgactggaatggactccaaaggaatggaaactgatggaatggaacggaatggaatttaatggaaagaaatagaatggaatagaatcgaatggaactgaatggaatggaatggagtcgaatggaatagaattgaatggaatggcattgaatggtatggaatggaatggaatggaatggactcgaacggaatggactggaacaaaatggaatcgaatggaatggaatgggattgaatggaatggaatggaatggaatggaatacaatggagtccaatggaatggatttgaatggaatgaaattgaatggaatcgaaatgaatagaatggaattgggtgtaatgaaaagaagtcaaatggaatggaatgcaatggaattgattcgaatggaattgactggaatggaatggaatgaaatgaaatggaaaggaatagaatggaaacaaatcagatggaacggaatggattggaatggagtcaaatggaatagaatcgattggaatgtcatcgaatggaatggaaaggaatggacctgaatggaatggactcgaatagaatggaaatgaatggaatggaatcaatggaagtgaatggaatggaatggaatggaatggaacagaaaggaatagaatgagatggaatctgttggaacagaatggaatcgaatggagtagaatgaaatagaatcgattggaaggtcatcgaatggactggaatgtaatgaactcgaatagaattgactgagaaaaaatggaatcgaacggattggaattgaagggaacggaatggaatggaatggacctaaatataatggactcgaatggaatggacccaaatagaatggactcaaaggaatggtttcaaatggaatttcttcgaacagattggaattgaatggaataccaaagtatagaatggaattgaatagaatggacgggaatggaatggactcgattggaatggactggagtgaaatggactccaaaggaatggaaactaatggaatgaaatggaatggaatttaatggaaagaaatagaatggaatggaatcagatggaactgaatggaatggaatggagtcgaatggaatagaatcgaatggaatggcattgaatggtatggaatggaatggaatggattcaaacggaatggactggaacaaaacggaattgaacggattggaatcgaatggaatggaatgggattgaatggaatggaatggactggagtggaatggagtccaatagaatggaaccaaatggaatggattcgaatggaatggaattgaatggaatcgaaagcaatagaatggaattgggtgtgatggaaagatgttgaatggaatggaatgcaatggaattgactcgaatggaatggactggactgcaatggaatggaatgaaaagaaatggaaaggaatagaatgaaaaggaatcggatggaacggaatggaatggaatggaatggaatggagtcaaatggaatagaatcgattgtaatggcatcgaatggaatggaaaggaatggacctgaatggaatggactcgaatagaatggaaatgaatggaatggaatcaatggaatggaaagtagaatggaatggaattggatggaacgaaatgtaatggaatagagaagaacggcatagaatctaacggaatggcattgaatgaaatggaatggaatcaaatggaatggaatgtaatgtacccaaatataatggactcgaatggaatggacttaaatagattggacacgaaaggaatggtctcgaatggaatttgttcgaataggatggaatcgaatggaagccaatagtatggaatggaatcgaatggaatagaatcgaatggaatggacaggaatgaagtggactggaatagaaaggacgcgaatgtattgtattgcaatgtaattgatttgaatggaatggaatcaaaaagaagtttatcaaattgaatggaatggtaagcaatggaatggaatataatgatatgcaatggaaaggaacagagtggaatcaagtggaatggaattgaatggaatggaatggaatggaatgcaatcgaatggaatggaatggagtggaatggactgcaatggaatggactggaaaaaattggattcaaatggattggaatcgaatgaaatgtaaagagatggactggaatggaatggacttgaatcgaatgaagtcgaatggaatgaactggaatggaagggaatggaatggaatggaatcaaaaggaatacaatggaattgggtgtaatggaaagatggcgaatggaatggaataaaatggaaggtacttgaatggaatggaaacgaatggaatggaatggaatggaatggaatagaatggaacgcaatcggatggaatggaatggaatcgaatggagtcaaatggaatagaatggaattaaatggcatcgaatggattggaatggaatgcaatggaatggaatggacatgaatggaatggattcgaatggtatagaatcatttggaatggcatcgaatggaatggaatggaatggaatagaatggaataaaatgacattaaattgattggaatggaatgcaatggaatgtaactgacacgaatggaatggactcaaatggaatagaatgatttggaatggcatcaaatggaatggaatggtatggaatggaattgaatggacccaaatgtaatggactcgaatggaatggactccaatagaaaggacaaggaatggtcttttctgttccttctcgaatgcaatttattcgaatggaatggatgagaatggaatgcaacagtatggaatggaatcgcatcaaatggaattgagtgaaatgcaatggaatggaattgaatggaatagaacggactcgaatgtaatggattgtaatgtaattgattcgaatggagtggaatcgaatggaatataaccaaatggaatggaatggaatgcaatggaatggaatagagtggaatgaaatggaatggaacagagtggaagagagtggaatggaaccgaatggaatgcaattgaatagaatggactggaatagaatggattggaacaaaatggaatcgaatggaatggaatggaacagaatggaatgcaccccaatgtaatggactcgaatggaatggaatcaaatacaatggactcgaaaggaatggtctcgaatggaatttattcgcatagaatggaatcgaatggaatgcaatagtgtgcaatgaaatcgaatggaatggaccggaatggaatggagttgaatacaacggattcgaatgtaatgcatgacaatataattgatttaaatgcaatggaatcgaatggaatgtaatcaactggaatgcaaaggaatgcagttgaatggaatagaatgtaatgcaatggaatggaagggagtggaatcgtgtggaatggaatcaaatagaatggaatcgaatttaatggaaccgaatggaatggactcgaatgaaatggaattgaacggaatggaatggaatggaatggacactaatggaatgggttcgaaaggaatggaaccgactggaatggaattgaatggaatcgaaaggaatagaatggagtggcgtgtaatgcaaagatatcaaatggaatggaaaggaatgaatggaatgggctcgaatggaatggactggaaaggaatagactcgactggaatggactggagtggaatggacttgaatggaatggaaacgaatggaatggaaaggaatagaatggaaaagaatagaatgggatggaaatggatggaaggaaatggaatggaatggagtcgaatggaatagaatggaatggaatggaatggcatcgaatggaatggagtggaatggaatggaatggacacaaatggaatagaacagaatagaatggcatggaatggaatggattggattgaatcgaatggacccaaatgtaatggactcgaatggaatggactcaaatagaatggactcaaaacgaatggtctcaaatggaatttattcgaataaaatggaatcgaatgcaatgtgatagaatggaatggaatcgaatggattggattggaatgaaatggactggaatataatgtactcgaatgtaatcaattgcaatgtaaaagatttgaatggaatggaatcgaatggaatgtattaaaatggaatgtaatggaatgcaatggaatgtaataaaatggaatgcaatggagtggaacggagtggaatcgagtggaatggaatcgaatgaaatggaattgaatgcaatggaatcgaatggaatggagtggaatggaatggactggaatggaatggactcgaatggaatggacaggaacaaaatggaatggaatggattggaatcgaacggaatagaatggaatggaatggaatggactcgaaaggaatggagtcgaatggaatggaattgaatggaattgaaaggaatagaatggaaaggagtgtaatggaaacatatcgaatggaaatggaatgtaatggattcgaatggaatggactcgaatggaatggactggagtgcaacggactagaatggaatggaaacaaatggaatggaatggaaaggattagaatggaatggaatcggatggaatggaatggaatggagtcgaatagaattgagtcgaatggaatggcaatgaatggaatggaatggaatggactccaatggaatgtactcgaatttaatagaatcgaatggaatggcattgaaaggaatggaatagaatgaaatgcaatggactctaatgtaatagactggaatcgaacggactcaaataaaatggaatcgaaaggaacggtcttgaatgaaatttatttgaatagaatggaatggaatggaatgcaatagtatggaatggaatcgaatagaatgaaacagaatggaatagactggaatagaacggactcgaatataatgtattgtaatgtaattgatttgagtggaatggattcaaatggaatgtaatcaaatggaatgaaacggaatgcaatggaatggaatagaatggaatgcaatggaatggaacggaatggaatcgattggaatggaatcgaatgtaatggaatggaatggactctaatggaatggactgtaacaaaatggaatcgaaagggttggaatcaaatggaatggaatggagtggaaaggaatgcaatgcaatggactcgaatggaaaggagtcaaatcgtatggaattgaatggaatggaatcaaacggaatggaattgagtggtatcaaaaggaatagaatggaatggagtgtattggaaagatatcgaatggaatagaatggactcgaatggaatggactgcaatggaatgaactcgaatgtaatggactggagtggaatggactcgaatggaatcgaaacgaatggaatggaatggaagggaaaggaatataatggattggaatcgggtggaatggaatggaattgaatgaagtcaaatggaatagaatcgaatggaatggccttaaatggaatgggatggaagggactcgaatggaatggactcgaatagaatggacacgaaaggtatgacctctaatggaatttattcgaatagaaaggaatcgaatggaatgcaatagtatggattggaatcgaatggaatcgaccggaatggaatggactggattagaacggactcgaatgtaatcgaatgcaaagtaattgattcgaatggaatggaattaaaaggaaagtaatcaaatggaatggaaaggaatgaaatggaatggaatagaatggaatgcaatggactggaatgcagtgtaattgagtggaagtgaatcgaatcgaatggaatcgaactgaaaggaatggaatggaatggtatggaatggtatagactcgcatggaatgcactggagtagaatggagtcgaatggaatcgaaacaaatggaatggaaaggaatagtttggaatggaatcagatggaaccgaatggaatggaatgcagttgaatggagtagaaccgaatggaatggcattgaatggaatggaatggcatagacccaaatgaaatgaactcgaatggaatggactcaaatagaatggacgccaaagaaatggtctcgaatggaatttattgaaatagaatggaatcgaatggaatgcaaaagaatggaatggaatcgaatacaatggatgagaatggaatggatgagaatggaatggactggaatagaatggactcgaatgaaatggattgcaatgtaattgattcgaatggaatggaatcgannnnnnnnnnnnnnnnnnnntggtatggaatggactcgaatggaatggagtcgaatggaatagaattgaatagaatggaaatcaatggaatcgatgggaatataatggaatggagtgtaatgcaaatatatggaatggaatggaatggaatggactcgaaaggagtggaatggaatggaatggactcgaatggaataaactggagtggaatggactccaaaggaatggaaacgaatggaatggaatggaaagattggaatggaatggaaagcaatagaatggaatggaaacggatggaacgaaatggaatggaaaggagtcgaatggaatagaatcgaatggaatggcatcgaatggaatggaatggaatggaatggaatggaatggactcgaatggaatggaaacgaatggaatggaatgcaatggaatggaatagaatggaatggaatcggacggaatggaatggaatggaatggagtggaatggaatagaatcgaatggaatggcatcgaatggaatggaatgaaatggaatggaatggaatggactcgaaagaaatgaaaacgaatggaaatggaatggaattcaatggaatagaatggaatggaatcggatggaatggaaaggaatggaatggagtcgaatggaatagaatcaaatggaatgtcatcgaatggaatggaatggaaaggaatggactcgaatggaatggagtcaaatggaatagaatagaatggaatggcatcgaatggaatggaatggaattgaatggaatggacccaaatgcaatgaacttgaatggaatggactcaaatagaatggaatcgaaaggaatggtctccaatggaatttattcgaatagagtggattcgaatggaatgcaatagtatggaataaaatctaattgaatgcaccggattggaatgactggaatagaaaagactcgaatgtaatggattgcaatgtaactcatttgaatggaaggaatagaatggtatgtaatcaaagggaatccaaaggaatgcaatggaatgcaatggaatttaatggaatgtaatagaatggactgcaatggaatggaacagaatggaatgcaatagaatggaatgtagtgcaatcgagtgcaatggaatcgaatggaatggaatcaaatggaatggaatcgaatggaatggagtggaatggaatggaatcaaatggaatgaactggaacaaaatggaatcgaacatattggaatagaatggaacggaataaaatggaatggaacggacacgaatggaatggaatcgaatggaatggaattgaatggaatggaatcaaatggaatggaattaaatggaatcaaaaagaattgagtggaatggaatggaatggaaacatatcgaatggaatggaatggaatggagtctaatggaatggattgtaaaggaatggacttgaagggaatggaatggaatggagtcaaaaggaatggactggagtggaatggactcgaatggaattgaaacgaatggaatggaatggaaaggaatagaatggattggaatcggttgggacgcaatggaaaggactggagttaaatggaacagagttgaatagaatgacattgaatggaatggaatggattcgaatggaatggactcgaatgaatagaagtcaaatggaatggcatcaaatggaatggaatggaagggaaaggaatggacacaaatgtaatggacttgaatgtaatggactcaaatacagtggactcgaaatgaatggtctcgaatggaatttattcgaatagaattgaatcgaatcaaatgcaatagtatggaatggaatcgaatggaatggaatcgaaaggaatggagtggaatggaatgcactggaatagaacagactcgaatgtaatggattgcaatgtaattgattcaaatggaatggaattgaatggaatgtaatcaaatggaatggaatggaatgcaatggaattgaatagaatgcaatgcacttgaatggaaaggagtggaattgggtggcttggaactgaatggaatggaattgaatggaatggacaggaatggaatggactcgaatggaatggaatggaacaaaatgtaatggaacagattggaatcgcaaggaaaggaatggaatggaatggaattgactcgaatagaatggagtcgaatggaatagaatcgaatggaatggaatcaaatgcaatggaaatgattggaattgaaaggaatacaatggaatggagtgtaatggaaagatatcgaatggaatggaatggaatggactaaaatggaatggactaaaatggaatggactcgaatggaatggactgcagtggaatggactcgaatcaatggaaacgaatggaatggaatggaatggaatggaatcggatggaaaggaatggaattgaatggaatgcagtcaaatggaatagaactgaatgcaatggcatcgaatggaatggaatggtctggaatggaatctactcgaatggaatggactaaaatggaatggaatcaaatggaatggactggattggaatggaattgaaagtaatgcaatggaatggaatggaatgcaatggaatggaatggaatggaacagaatggaatggaatcggattgaatggaatggaagggaatggagttgaatggaatagaatcaaatggaatggcatcgaatggaattgaattgaatgtaaatgaatggattggactcaaatggaatggcattgaatggaatggaatggaatggaccgaaatgtaatggactcgaacggaatggactcaaatagaaaggactagaaagcaatggtctcaagtagaattaattcgaatagaatggaatcgaatggaatgcaataatatggaatggcatcgaaggtaatggactgcaatggaatggactggaagagaacggactcgaatataatggattgcaatgtaattgattcgaatggaatggaatcgagtggaatgtaatcaaatggaattgaatggaatgcaatggaattgaagaggttggaatgcagtggaatggaacggagtggaatcgagtggaatggaatagaaaggaatggtatcgaatggaatggaatcaaatggaatggactggaatggaatggacaggaatgaaatggaatggaatggaatggactagaattgaatggagtcaaatggaatggaatcgaatggaatggaattgaatggaatcgaaaggaatagaattgagtggagtgaaatggaatgatatcgaatggaatctaaaggaatggacttgaatggaatggattgcaatggaatggacttcaatggaatggacaggagtagtacagactcgaatagaatggaaacgaatggaaagaatggaaaggaatggaataaaatggaatggaatcggatggaacggaatgtaatggagtcaaatggaatagaatcgaatggaaaagcatcgaatggaatggaatggaatgcaatggaatggattcaaatgtaatggactcgaatggaatggattcaaatagaatggaatcgaaaggaatggtctcaaagggaatttattagaatagaatataatcgaatggaataaaatagtgtggaatggaatcaaatggaatggaatcaaatggaatgcaacggaatggaatggactggaatagaactcattcgaatgtagtggactgcaatgtaattgtttagaatggaatggaatcgaatggaatgtaatcaaatggaatggaatggaatgcaatcgaatggaattgaatggaatacaatggaatggaatggagtggaattgagtggaatggaatcgagtggaatggaatcgaatggaatggaattgaatagaatggaatcgagtggaatggaattgaatggaatagagtcgaaaggaatggtctctaatggaatttattcaaatagaatggaatctaagggaatgcaaatgtatggaatggaatcgaatggaatggacgggaatgaaatggactggaatagaatgaactcgaatgtaatggattgcaaaacaattgattcgaatggaatgcaattgaatggaatgtaatctaatggaatggaatggaaagcaaacgaatggaatagaatagaattcaatggaaaagaaagtagtggaatcgagtgcaatggaattgaatagaatggaatcaaatggaatggaatcgaatggtatggaattaaatggaatcgaatggaatagaatggaattgtgtgtaacggaaagataacgaatggaatggaatggaatagaatggaattgtgtgtaacggaaagatatcgaatggaatggaatggaatggacacgaatagaatggactggaacaaaatggaatagaacggattggagttgaacagaatggaatggaatggaatggtaaggaatggagtcgaatggaatggagttgaatggaatggaattgaatagactggaattcaatggaattgaagggaatataattgaatggagtgtaatggaatgatatcaaatggaatggaatggaaaggacacgaatggaatggactggaatggaatggacatgaatggaatagactggagtggaatggaatcaaatgtattggaaacaaatggaatggaatggaatggaatggaaagggattgaatggaatgcaattggatgaaatggaatggagttgaatgggatagaatcgaatggaatggcatcaaatggaatggaaaggaatttattcaaatagaattgaatcgaatgcaatgcagttgtaagaatggaatctaatggaatggaatcgaatggaattaactggaatggaattgactggaatagaacggactcgaatgtaatggattgccatgtaattgattcgaatggaatggagtcgaatggaaagtaatcaaatggaatggaatggaatggaatggaaagaagtggaatctactggaatgaaattgaatggaatggactcgaatggaatggactggaatggaatggactcgaatggaatggaatggaatggaatgtattcgaatggaatggactggaacaaaataaaatcaaactgattcaaatcgaacggaacggaacggaatggaatggaatggactcgaatggaatggattcgaatagaatggaaacgaatggaatggaattgaatggaatggaattgaatagaattgaaaggattacaatggactggagtgtaatggaaacatatcgaatggaatggaatggactcgaattgaaaggaattgaatgaatgtgaatggaatggaaacgaacgttacggaatggaatggaaaggaaaggaaaggagtagaagggtatggaatcggatggaaagaaacggaatggaatggagtcgaatggaataaaatcgaatgcaatggcatcgaatggaatggaatggaatggaatggacttgaaaggaatggacacgaatggaatacaatagaaaggaatggaatggaatgcaaccaaatgtaatggactcgaatggaatggactcaaatagaattcattttgaaaggaatggtcacgaatggaatttattcgaatagaatggaatcgaaaggaatgcaataatatggaatggaatcaaagggatctaaatcgaatggaatggaccggaatggaatggattggaatagaacatactcgaaagtaatggaatgcaatgtaatggaatcgaatggaatggaatcaaatggaatgtaatcaaatggaatgaaatggaatgcaacggaatggaatagaatggaatgcaatggaatgaaatggagtggaatcgagtggaatggaagtgaatggaaaggaatggaatagaatggaatcgattggaatggactggaagggaatagactggaatggaatggactggaacaatatggaatcaaatggattggaatcgaaaggacagagatggaatagagtggtatggaatggacttgaatggaatggagtcgaatggaatggattcaaatggaatggcatcgaatggaatggaatggaatggactcgaatggactggaaacgaacggaatggaatgtaatggaatggaatagaatggaatggaatgaaatagaatggaatggagtcgaatggaaagacatggaatggaatggtatggaatggactcgaatggaatggagtcgaatggaatagaattgaatagaatggaaatcaatggaatcgatgggaatataatggaatggagtgtaatgcaaatatatggaatggaatggaatggaatggactcgaaaggagtggaatggaatggaatggactcgaatggaataaactggagtggaatggactccaaaggaatggaaacgaatggaatggaatggaaagattggaatggaatggaaagcaatagaatggaatggaaacggatggaacgaaatggaatggaaaggagtcgaatggaatagaatcgaatggaatggcatcgaatggaatggaatggaatggaatggaatggactcgaaagaaatgaaaacgaatggaaatggaatggaattcaatggaatagaatggaatggaatcggatggaatggaaaggaatggaatggagtcgaatggaatagaatcaaatggaatgtcatcgaatggaatggaatggaaaggaatggactcgaatggaatggagtcaaatggaatagaatagaatggaatggcatcgaatggaatggaatggaattgaatggaatggacccaaatgcaatgaacttgaatggaatggactcaaatagaatggaatcgaaaggaatggtctccaatggaatttattcgaatagagtggattcgaatggaatgcaatagtatggaataaaatctaattgaatgcaccggattggaatgactggaatagaaaagactcgaatgtaatggattgcaatgtaactcatttgaatggaagggaatagaatggtatgtaatcaaagggaatccaaaggaatgcaatggaatgcaatggaatttaatggaatgtaatagaatggactgcaatggaatggaacagaatggaatgcaatagaatggaatgtagtggaatcgagtgcaatggaatcgaatggaatggaatcaaatggaatggaatcgaatggaatggactggaatggaatggaatcgaatggaatggactggaaaaaattttatcgaacggatgggaatcgaacgtaacggaatggaatggaatggcatggactctaatggaatggagtcgaatggaatggaatcaaatggaatagaatcgaatggaatggaattgattggaatagaatggaatggacccaaacataatggactcatagggaatggactcaaatagaatggactcgaaaggaagggtctcgaatggaatttattcgcatagaatggtatcgaatggaatgcaacagtatgcaatggaatcgaatggaatggaatcaaatggaatggagcggaatggaatggactggaatagaaccaactcgaatgtaattcattgcaaagtaattgattcaaatggaatggaaatgaatggaatgtaatctaatggaatggaatgcaatgcaatggcatggaatagaatggaatgcaatggcatgaaatataatggaatgcaatggtatggaatggagtggaatcgagtggaatggaatcgaatggaaaggaattgaatttaatggaatcgaatggaatgtactggaatggaatggactcaaatggaatggactggaacaaaatggattcgaacggattggaattgaatggaatggaatggaatagaatggattggaatggaatggaatggactcgaatggaatggagtcgaatggaatgtaaccgaatggaatggaattgaatggaatagaatttaatggagtgtaacgggtagatattgaatggattggaattgaatagagtggactcgaatggaatggactggaatggaatggaatggaatagaatggaatgtactggagtagaatggactcgaatacaatggaaatgaatggaatgcaattgaacggaatggaaaggaatagaatggaatggaattggatggaacggaatggaatgcaatggagtcgaatggaatagaatcaaatgcaatggcatggaaaggaaaggaaagtaatggaatggaagtgaatggacttgaattcaatggactcgagtggaatacgatagtatggaattcaatggagtcgaatggaatagaatcaaatgcaatggcatggaaaggaaaggaaagtaatggaatggaagcgaatggacttgaattcaatggacttgagtggaatacgatagtatggaatggcatagaatggaatggaaatgaatggaatggcatggaccaaaatgtaatggactcgaatagaatggaatcaaatagaatggattcgaaaataatggtctcaaatggaatttatatgaaaagaatggaatagaatggaatgcaatagtatggaatggaattgaaaggaatggaatccattggaatgaaatggaatggaatggactgaaatagaacagactcgaatgttatggattgcaatgtaattgattcaaatggaatggaaactaatggaatgtaatcaaatggaatgcaatcgaaagcaatggcatggaagagaatggaatgcaatggaatggaacagagtgtaatcgagaggaatggaatcgaatggaaaggaatcgaatggaatggaatcaaatggaatgtactggaatggaatggactgaaatggaatggactcgaatggaatagactcatagaatggaatggaaacgaatggaatagaatggaatggaaaggaatataatggaatcgaattggatggaatggaatggaattgaatggaattgaagggaatagcatccacaggaatggcatcgaatggaatgaaatgcaatggaatggaatggaatcgaatagaacagagacgattcaaatagaattgaatagaatggcatcaaatcgaatggaatggagtggaatggaatggaatggaatggaatggaatggaatggaatggaggcccatgtaatggactcgaatggaatagactcgaatggaatggactcaaatggaaaggattccaaagcaataacctcaaatgaaatttatttgaaaagaatggaatcgaatggactggaatagtatggaatggaatggaatttaatggaatggaatggactggaccgcaatggaatggactgcaatagaacggactcgaatgtaatgaattgcaatataactgattcgaatggaatggaatggaatggaatggaatggaatggaatggaatggaatgcaatggaatggaatagaaaggaatgtagtggaatggaatgtagtggaatcgattggaatggaatcgaatggaatggaatcgaatggaatggaatcgaatggaatggactagaatgtaaaggactggaataaaatgtaatcaaatggattgcaatcaaacggaacagattagatgtaatgcaatataatggactcgaatgcaatggagtcgaatggaatggaaacgaatggagtggaatcgaatggaatggaattgaatggaatctataggaatagaatggcgtggagtgtaatggaaagatatcaaatggtatggaatggaatccaatggactcgataggaatggaatggaatggaaagaactgaagtggaatggactggagtggaatggacacgaatgtaatggaaacaaacggaatggaatggaaaggaatagaatgaaatggaatcggatggattggaatgaaatggaatggagacaatggaatagcgtcgaatggaatggtatcgaatggaatggcatagaatgaaatggaatggacacgaatggaatggactctaatggaatagaatcgaatggaatggcatcgaatggaatagaaaggaatggaatgggatggacccaaatgtaatggactcaaatgtaatggattcaaatagaatggactcgaaaggaatggtctcaaatgtaactgaattgaatggaatcaaaaggagtgcaatggtagggaatggaattgaatggaatggaatcgaatggaattgactagaatggaatggactggaatagaatggacatcaatgtaatggattgaaatgtaattgattcgaatgccttggaatcgaatggaatgtaatcaaatggaatggaatggaatggaatgggatgcaatggaatggaacggagtggaatcgagtggaatggaattgaatggaatggaatcgaacagaatggactcgaatggaatcaaatcaaatggaatggactggaacaaaatgtaatcgaacggattggaattgaatggatcgcaatggaatggaatggaatgcacctgaatggaatggagtcgaatggaatggactggaacaaaatggaattgaatggataggaatagaatggaacggaatggaaaggaatggaatggaacggaatggaatggaacagaatggaattcacacgaacggaatggagttgaaaggaatggaatcgaatggaatggaatcaaattgaatggaattgaatggaatcgaaaggaatacaatggaatggagtgtaatggaaagatatcaaatggaatggaatggaagggaatggactcgaatagaatggactggaatggaatggactcgaatggaatggactgtagaagaatggactcgaatggaacggaaatgaatggaatgggatggaaagcaatcggttggaacagaatggaatagaatggagtcgaatgggatagaatcaaattgaatggcttcaaatggaatggaatggaatcaaatcgaatggaatagaatgaaatggactcaaatggaatgtactcgaatggaatagaatcgaatggaatggcatcgaatggaatggaatggaatggaaaggaatagaaaggaatggaatggaatcaaactgattggaattgaatggaatagaaaggaatagaatggaatggaatgtaatggaaagatgtcaaatggaatggtaaggaatggaatggactcgaatggaatggactagaatagaatggaatcgaatggaatgaaatggagtggaatggacttgaaaggaatggaaatgaatggaatggaatagaatggaatggaatggaaaggaatataatagaatggaatcagatggaatggaatggaaaggaatggagtcaaatggaatagaatcgaatgggatggcatcaaatggaatggaacggaatgggatggactcgaatggaatagaatagaatggaatggcatcgaatggattggaatggaatggactcgaatggaatgcaatcgaacggaatgtaatcaaatggaatggaatgcaatgcaatggaatggaagagaatgcaatgcaatggaatggaatgcagtggaatggagtggaatagaatcgaatggaacggaatccaatgtaatggaatcgaatggaatggactgtaatggaatggacttgaatggaattgactcgaatggaatggactggaacaaactggaatcaaacggcttggaatcgaacggaacgataggaacggaatggaatggaatggattcgaatggaatagagtcaaatggaatggcatcgaatggaatggaatagaatggattggaatggactcgaatggaatgaaatagaatggagtagattcgaatggattggcatcaaatagaatggaatggaatggaatggaatggactccaatggaatggactcaaaaggaatagaatagagtggaatgccatcgaatggaatggaacggacccaaaggaaatgtattcgaatggaatggactcaaatagaatggaatcgaaaggaatggaatcgaatggaatttattcaaatagaatggaatcgaatggaatgcaataatatggaatggaattgaaaggaatggaatcgaatggaattcattcgcatagaatcgaattgaatggaatgcaataacatggaatggaattgaaaggaatggaatcgaatggaatggaccggaatggaatggactggaatagaatggacacaaatgtaatggattgcaaagtaatagacttgaatggaatggaatcgaatggaatgtaatcaaatggaatttaatggcatgcaatggaatggaatagaatagaatgcaatggaagggaacggagtggaatcgagtggaatggaatcgaatggaatggaaaagaatggaatgaaatagaatggaatggactggaatggaatggaatcgaatgcaatggagtggaacaaaatggaatcgaacggattggtatcgaacagaacggaatgaaatggaatagaatggactcaaatggaatggagttgaatggaaaggaaccgaatggattgtaatcgaatggaatggaattgaacggaatcaaaaggaatagaatggaatggagtgtaatggaaagatatcaaatggaatgtaatggaatggaattgaatggacagaacttgaatggaatgatctcaaatggaatggaatggagtggaatggacacgaatggaatggaaacgaatggtagggaatggaatggaaaggaatagaatggaatggaattggatgtaacggaatggaatggaatggattcgaatggaatagaatcaaatggaatgtcatcaaatagaatggagttgaatgcaatggaatggacttgaagaatggaatcgaatggaatagaatccaatggaatggcatcgaatcgaatggaaagtaatggaatggaatggacccaaatataatggactcgaatggaatggactcaaatagaatggacttgaaaggaatggtctcgaatggagtttactcgaatagaatgaaatccaaaggaatgcaatagtatggaatggaatcgaatggaatgtactggaaaggaatggactggaatagaatggaatcgaatgtactggattgaaatgtaattgattccaatgcctttgaatcaaatggacagtaaccaaatggaatggaatgaaatgcaatggaatggaatagaatggaagacaatggaattgaacaaagtggaatcgagtggaatggaattgaatggaatggaatggaatggaatcaactggaatggaatggactcgaattgaatggactggaacaaaagggaatcgaatggatcagaatcaaaccgaatggaatggaatggaacggaatggaatggactcgaatggaatggagttgaatggaatggaacggaatggaaaggaatcgaatggaatgtaattgaatagaatagaaaggaatagaatggaatggagagtaatagaaatataaagaatggaaagaaatggaaaggaatggacacgaatggaattaactgaaatggaatggacttgaatggaaaggactggagtggaatggactcgaatggaatggaaacttatgaaatggaatggaatacgatagaatggaattggatggaatggaattaaattgaatggaatcgaatggaatagaaaagaatggaatggcatcgaatggagtggaaaggaatggactcgaatggagtagaatcgaatggaattaaatggaatggaatggaatgaaatggaagttaccaaaatgtaatagactctaatggaatggacacagaatggacccaaaagtaagggtatcaaatggaatttattcgaatagaatgaaattgaatcaaatgcaatagtatggaatggaattggatggattggaatcaagtgcagtggaccagaatggaatggactggaatacagctgactggaatgtaatggattgcaatgtacttgattcgaaaggaatggaattgaatggaatgtaatcaaatggaatgcaatggaatggaatgggaaggaacagaaagcaatgcaatggaatggaatggcttggaatcgagtggaaaggaattgaatggaatggaatcgaatggaatggattggaatggaatggactcgaatggaatggactggaaaaaaatggaaacgaacggattggaatcaaatgtaacaaaatggaatggaatggaaaggaatggacgtgaatggaatggagtcgaacgtaatggaaccgaatggaatggaattgaatggaattgaaaggaatagaatagaatggagtgtaatggaaagatattgaatggaatggaaaggaatggaatcaactcgaatggaatggactggaacgaaatggaatcgaatggaatggactggagtggaatggactcgaatggaatagaaacgaatggaatggaatggaaaggaacagaatggaatggaatcagatggaacggaatggaatgaaatggagtcnnnnnnnnnnnnnnnnnnnnnnnnnnnnnnnnnnnnnnnnnnnnnnnnnnnnnnnnnnnnnnnnnnnnnnnnnnnnnnnnnnnnnnnnnnnnnnnnnnnnnnnnnnnnnnnnnnnnnnnnnnnnnnnnnnnnnnnnnnnnnnnnnnnnnnnnnnnnnnnnnnnnnnnnnnnnnnnnnnnnnnnnnnnnnnnnnnnnnnnnnatggatggaatggaatggaatggaatggaatggaatggactcgaatggaatggacaggtaatcgaatggactggagaggaatggactcgaatggaatggactggaatggaacggacttgagtgaaatggaaacgaatggaaagaattgaatggaaaggaatggaaaggaatagaatggaaggaatcagatggaactgaatggaatggaatggagtcaaatgaaatagaatagaatggaatggaatggaatggactcgaatggaatgtactcgaaaggaatagaatagaatggattggcatcgaatggaatggaatggaatgaattgcaatggaatggaatggacccaaatggaatggacacgaatggaatggactcaaataaaatggactcaaaaggaatggtctcgaatagaatttattcaaatagaatggaatcgcatggaatgagaaagtgtggaatgcaatgcgaaaatgtggaatggaatcgaatggaatggaatcaaacggaatggacaggaatggaaaggactgaaacagaacagactcgaatatgatggattgcaatgtaattgatttgaatggaatggaatcaaatggaatggaatcaaatggaatggaatggaatgcaaaggaatgtaattgaatggaatgcaatggaatggaactgagtggaatcgagaggaatggaattgaacggaatggaatcgaatggaatggagtcgcattgaatggactggaatggaatggactcaaatggaacggactgaaacaaaatggaatcgaatggaaaggaatcgaatgaaatggaatggtatggaaatgaatggaatggaatggaatggaatgcaaaggaacagaatggaatggaatcgtgtggaatggaatggaatggaatgcagttgaatggaatagattcgaatggaatggcaacgaatggaatggaatggaatcgaatggaatgcacttgaaaggaatagaatagaatggaatggcaccgaatggaatggaatggactggacggaaatgtaatggactcgaaaggaatggactcaaaaacaatggacttgaaaggaatggtctcgagtggtatttattcgaatagaatggaatcgaaacgaatgcaatagaatggaatataatggaatggaatagaatccaatagtactgacttgaatggaatcgactgaaatagaatgcactcgaatgtaatggattgcaatgtaattgattagaatggaatggaaatgaatggaatgtaatcaaatggaatggagtggaatgcaatggaatggaatagaatggaatataatgaaatggaatggagtggaatcaagtggaatgggattgaaaggaatgtaatcgaatggaattgaatgaaatggaatggactggaatggaatggactcgaagggaatggagtcgcatgggatggtatcgaatggaatgggatcgaatggaatggaattgaatataattgaaatgaatagaatggaatggagtgtaatggaatgatatcgaatggaatggaagggaacggactcgaatttaatgcactggaatggaatggactcgaatggaatggaaacgaatggaatggtatggaatggaagggactggaaaggaataggacggaatggaatcggatggaatggaatggaatgatgtcgaatggattagaattgaatggaaagtcattgaatggaatggaatggaatggagtggaatggaaaggaatggaatggagtggaaagcaatccaatggaatggaatggaatggattagaatggaatggagtaaaattcacccaaatgtaatgggctcaaatggaatggattcaaatagagtagactcgaaaggaatggcctcgaatggaatttatttgaatagaatggaatcgagtggaaagcaatagtatgaaataaaattgaaaggaaaggaattggatggaatggacttgaatggaatggacttgaaatgaacggactgaaatgtaatgtattgcaatgtaattggttcgaatggaatggagttgagcggaatgtaatcaaatggaatggaatggaattcaactgaatggaatagaatggaatgcaatggaatggaacagagtggaagagagtggaatggaatcatatggaatggaattgaaaggaatggaaacgaatggaatggaatgcactcgaatggaatgcagtggaacaaaatggaatcaaacggattggaatcgaatggaacagagtggaatggaatggagtcaaaaggaatggagtcgaatggaatgaaaccgaatggaatggaattgaatggaatcaaacggaatagaatggaatggagtgtaatggaaagacatcgtaaggaatggaatgaaatggctcaaatggaatggactggaatggaatgggctcaaatagaatgcactggagtggaatgaactcgaatggaatggaaacgaatgtattggaatgggatggaatgcaatagaatggaatggaatcggaaggagcggaatggaatgaaatggagtcgaatggaatagaatcgaatggaatgtcatcaaatggaagggaatggaatggaatggaatcgactcgtatggaatagaataggattgaatggcatcgaacagaatggaacggaatggaatggaccctttggggtccatttggattcaaatggaatggactcaaacagaatggacttgaaagaatgttctcgaaaggaatttattcgaatagaatggaatagaaaggaatgcaatattatggaatggaatcgaatggaatggaatcgaatggaaaggaacggaatggaatggaatggaatagaatggactcgaatgtaatgcactggaaagtaatttatttgaatggaatggattcaaatggaatgtaatcaaatggaatggaatggaatgcaatagaatggaatagaatgcaattcaatggaatggaagggagtggaattgacaggaatggaaccaaatggaaaggaatcgaatggaatggaatggattcgaatggaatggaccagaacaaaatggaatcgaagagactgggatcgaatgtaatggaatggaatggaagggaatggaatggactcgaaaggtatggattcgaatgacatggaaacgaatggaatggcatcgaattgaatggaatttaatggaatcgaaatgtatagaatggaatagagtgtaatggtagggtatcgaatggaatggactcgaatggaatggcctggaatggaatggagtcgaatggaatggactcgactggaatggactcgaatggaatggaaacgaatggaatagaacggaatggaatggaaaggaatagaatggaatggtatcagacagaacggaatggaatggaatggagtcaaatgcaatagaatcaaattgaatggcatcgaatggaatggaatggaattgaaaggactcatatagagtggactcgaatggaatagaatcaaatggaatggcatcaaatggaatggaatggaatggacccaaatgtaatagactcgaatggaatgccctgaaatagaatggatttgaaaggaatgatcttgaatgaaatttattcgaatagaatggaatcgaatggaatgcaatagtatggaatggaatcgaatagaatggaatcaaatggaatggatcggaatggaatggactggaatacgacggactcgaatgtaatggattgcaatctaattgattcaaatggaatggaatcgaatgtaatggaatcaaatggaatggtatggaatgcaatggaatggaatagaatggaatgcaatggaatggaatggagtagagtcaagtggaatggaatcgaaaggaatggaatcgaatggaatggactggaatggaatggactcgaatggaatggactggaacaaaatggaaacgaacggatttgaattgaaaggaatggaatggactcgactggaatggagtggaatggaatggaatggaatggaatggaatggaatagaatggaatagaatgcaattgtacggaatcgaaaggaatagaatggaatggagtgtaattgaaagatgttgaatggaatggaatggaatggaaaggaatggactcgatggaatggaatggaaaggaatgggctcgaatagaatggactggagtggaatggactcgaatggaatggaaaagaatggaatggaatggaaaggaaaggaatagaatggaatggaatcggatggaatggaatgaaatggaaccgcatcgaatggaaaagaatcgaatggaatggcgtcgaatggaatggaatggaatggaatggaatggaatggactcgaatggaaaggactcaaatgcaatagaatgaaatgcaatgggaacgaattgaatgtaatgtaatagaacatacccaaatgtaatggactcgaatggaatggtctcaaatagcatggacttgaaactaatggtttcgaatggaatttattcaaatagaatgggatcaaatggaatgcaatagtatgatatggaatcgaatggaatggaatcgaatggattggaccagaatggaatggaatgggacagaatggacaagaatgtaatggattgcaatgtaactgattcaaatggaatggaatccactggaatgtaaacaaattgaatggaacggaatgcaatggaaaggaatagaatggaatgcaaaggaatggaacggagtggaatcgagtggaatggaatagaatgaaatggaatcaaatggaatggaattgaatggaatggactggaatggaatggactctaatggagtggagaggaacaaaatgagaacaaacggattggaatcgagcgcaacagaatgtaatggaatggaatgggctcgaatggaatggagtcaaatggaatggaattgaagggaatggaatagaatggaatggaattgaatggaatcaaaatgaatagaagggaatgcagtttaatgtaaagatatcgaatggaatagaatggaaaggactcggatgcaatggactgcaatggaatggactcgaatggaatggactggagaggaatggacacgaatgtaatggaaacgaatggaatgtaatggaatggaatggaaaagaatagaatggaatggaatcggatggaatgggatggaacggtatcgaatggaatagaatcaaatggaagggcatcgaatggaatggaatgaaatggaatggaatgaaatgaaatggacttgaatgcaatggactcgaatggaatagaatcgaatggaatggcatcgaatggaatggaatggaatggaatgaaatggaatggaatggaatggaatggaatggacccaaatgtaatagactccaatggaatggactcaaatagaatggacttgaaaggaaaggtcacgaatgaaatttattcgaatagaattgaattgaatggaatgaaatagtatggaatggaatcgaatggaattgactggaatggaatggactggaatagaacggactcaaatgtaatggattgcaatgtatttgtttcgaatggaatggaatggaatggaatgtgatcaaatggaattgaatggaatgcaatggaacggaatagaatgggacgcaatgtaatggaacggattgatatcgggtggaatggaatcaaatggaatggaatcaaatggaatggaatcgattggaatggactgaaatggaatggactcgaatggaatggactgaaacataatggaattgaacggattggaaccaaacgaaacggaacggaatggaatggaatggcctcgaatggaatggagtcaaatggaatggaatcgaatggaatggaatggaatggaatggaatggaatggaatggaatcgtaaggaatagaatggaatggagtgtagtggaaagattttgaatgcaatggaatggaagggaatggactcgaatggaatggaatggaatggaatggactcgaattgaatggactggagtggaatgggctcaaatgggatggaaacaaatgggatggaacagaatggaatggaatggaatgaatggaaaggaatagaatggaatggaatcggatggaacagaatggatgggagtgtaatggaaagatatcgaatggaatggaatggaatggactcgaatggaatggatgggaaaggaatggactcaaatggaatggactggagtggaatggtcttgaatggaatggaatgcaatggaatggaaaggaatagaatgcaatggaatgggatggaatggaatggaatgcagtctaagagaatagaattgaatgcaatgccatcgaatggaatggaatgcaatggactagaatgaaatggactcaaatggaatagaatagaatggaatggcatggaatggaatggaatagaatggagtgcaataaaatggaacagagtggaatccagtggaatggaatggcatgggatggaatggaatggaatggaatggaaccaaatggaatggagtcgaatagaatggaatggaattgaatagaatggaattgaacacaatcaaaaggaatagaaagaatggagggtaatggaaagatatcgaatggaatagaatggaaaggaatggactggaatggaatggacttgaaagggatggactggagttgaatggactcgaatgaaatggaaaagaatggaatggaatggaatggaacgattagaatggaatggagtgggatggaatggaatagaatggattgaaatcgaatggaatagaatcgagtggaatggcatcgaatggaatggaatggactcgaaaggagtggaaagtaatggaatggaatggaatggattggaagagaaaggaatagaaaggaatggaattggaaggaacggaatggaatggaatggagtccattggaacagaatggaatggaatagcatctaatggaatggaatggaatggaatggaaaggacttgaatggaatggattggagtccattggaacagaatggaatggaatagcatcgaatggaatggaatggaagggacttgaatggaatggactcgaatggaaaagaatagaatgcaatggcatcgaatgtaaacggatggaatggaatggacccaaatgtaatagactcaaatggaatggactcaaatacaatggactcgaaaggaatggtctcgaatgcaatttatgcgaatagaatggaatcgaatggagtgcaatagtatggaatgggatcgaatggaatggaatcaaatggaatggaatggaatggattaaatgcactggaatagaaaggactcgaatgtaatggattgcaatgtaatttatttgaatggaatttaatggaatggaatgtaaccaaatggattggaatcgaatgcaatggaatggcattgaatggaacgcacatggaatggaatggagtggaatcgagttgaacggaatggaatggaatggactcgcctggaatggactggaatagaatggactcgaatggaatgtactggaaaaaatggaattgaacggattacaatggaatggaatggaatggaatggaatggaatggaatggaatggactggactcaaaaggaatggagtcgaatggaatgtaatcaatggaatgaaatggaatggaatggaactgaatggaattgaaaggaatagaatggaatggagggtaatggaaagatattgaatggaatggattggaattgaatggactcaaaaggaatgcgatggaatggaatggaatggaatagaatggaagggaatcggacagaacggaatggaattgaatggcatcaaatggaatagaatcgaatggaatggcttccaatggaatggaaaggaatggaatggaattgaaaggaatagaatggaatggaaacggatggaatggaatggaatggagtcgaatggaatagaatcgaatggaatggcattgaatggaatggaatggactcgaatggaatggaaacgaatggaatggattggaatgcaaaggaatagaatagaatggaatcggatggaaaagaatggaatggaatggagtcgattggaatagaatagaatggaatggcatcgaatagaatgaaatggaatggaatggaatggaatggaatggaatggaatggaatggattggaatggaatggaattgaatggaatggaatcgaatgaaaaagaatagaatgtaatggcattgaatggaatgggatagaatggaatggaatggagccaaatgtaatggactcaaatggaatgtactcaaatagaatggactccgaaggaatggtatcaaatggaatttatttgaatagaatggaatcgagtggaatgcaattgtatggaatggaattgaatggaatgcaattgtatggaatagaatcgaatgtaatggaattgaatggaatggagtggaatggaatggattagaatagaatggactccaatgtaatgcgttgcaatgtaattgatttgaatggaatggaatcgagtgaaatgtaatcaaatggaatggaatggaatgcagtggaatggaatggaatggaatgcaatggaatagaaaggagtggaatcgagtggaatggaatcgaaagaaatggaattgaatagaatggactggaataaaatggattcgaatggaatggcatggaatcaaacggattgtaattgaatagaatggaagggaatggaatggaatggaatggagtcgaatggaatggagttgaatagaatgtaatcgaatggaatggaaacggatggaatggaattgaatggaatcgaaaggaatagaatggaatggagtttaatggaaagatatggaatggaatggaatggaatggactcgaatggaatggactggaatggaatggacttgaatggcatagactggagtggaatggactcgaatagaatggaaatgaatttaatggaatggaatggaatgaatagaatggaatggaatcgtatggaatggaatggattgggttggaatcgaatggattagagtcgattagaatgacatcaaatggaaaggaatggaatggaatgggctcgaacggaatggacttgaatggaatagaattgaaaacaatggcatcgaatggaatggaaaggaatacaatggaatggaatggaatcgaccaaaatgtaatggactcgaatggaatggactctaatataatcgactcaaaaggaatggtctcgaatggaatttattcaaatagaatagaatcaaatggaatgtaatagtgtggaatggaagcgaatgaaatggaatcaaatggaatggaacggaatgaaatggactggaatagaatggactcgaatgtaatggattgcaatgtaattgattcaaatggaatggaatcgaaggaatagaatggaatggagactaattgaaagatatcaaatggaatggactggaatggaatagactggaatggtatggactctaatggaatcgactggagtggaatggactccaatggaatggaaactaatggaatggaattaaatggactctaatgaaatagaatcgaatggaatggcattgaatggaatggaatggaccaaaatgtaatggactctaatggaatgtacgcgaatagaatggactcaaaaggattggattcgaatggaaattattctaatagaatggaatcaaatcaactgcaatagtatggaatggaatagaatggaatgaaatcaaatggaatggatcggaatggaatggactggaatagaacagactcgaatgtaatggattgcaatgtaactgactcaaatggaatggaatagaatggaatgtaataaaatggaatggaatacaatggaatggaataagatggaatggaatggaatcgaatggagtcgaatggaatagagtgcaatggaatggaatggactcgaatggaatggcatcgaatggaatggtctggaatgaaatggactcgaatggaatggactggagaggaatagactcaaatggaatggaaacgaatggaatggaatggaatggaatggaatggaatggaatggaatggaatggaatcggatggaatggaatggaatggaatgcaatcgaatggaataggatcgaatggaatgtcatcaaatggactggaaggaaaggaatggactcgaatagaatggattcgaatggaatagaatcgaaagaataggcatggaatggaatggaatggaatggaatggaatggaatggaatggaatggcatggaatggagtggaatgtacccaaatgtattggactcaaatgtaatggacccaaatggaatggactctgaagaaatggtgtcgaatggaacttatttgaatagaatggaatcgaatggaatgcaatagtatggaaaggaatcgaatggaatggaatcgagtggaatggaacggaatggaatggattggaataaaacgcaatagattgtaacggattgcaatgatattgattcgaatggaatggaatctaaaggaatggaatcgaatggaatggaccagaatggaatggactggaatagaacggactcgaatgaaatggtttgcaatgtaattgattcgaatggaatggaattgaatggaatgtattcaaatggaatggaatggaatgcaatggaatggaatagaatggaatgcaatggaatggaaaggattggaattgagtggaatggaatcaaattgaatggaatcgaatggaatggaccagaatggaacggactcgaatggaatggactaggacaaaatggaatggaacggattggaaacgaaaggaacggaatggaatggaatgaacttgaatggaatggagtcaaatggaatggaatcaaatggaatggaattgattggaatagaaataaatagaatggaatggagcgaaaaggaaatgtatggaatggaatggaatggaatggaatggaatggaatggaatggactcgaatggaatagactagaatggaacagactcgaatgaaatggactggagaggaatggacacgaatgaatggaaacgaatggaatggaatggaatggaaaggaatagaatggaatggaattggatggaacggaatgggatggagtggaatggagtcgaatggaatacaatcaaatggaatgacatcgaatggaatggtatggaatggagtggacttgaatggaatggactagaatggaatagaatcaaatgcaatggcatggaatggaatggaatggacccaaatgtagtggactcgaatggaatggacccaaatagaatggactcaaaaggaatggactcgaatggaatttattcgactagaatggaatcgaatggaatgcagtagtatggaatggaatcgaatggaatggaccggaatggaatggacaggaaaagaaaggactcgaatgtaaaagaatgcaatgtaatagattcgaatggaatgaaatcgaatggagcgtaatcaaatggaatggtatggaatgcaatggaatggaataaaatggaatgcaatggaatggaacggagtggaatcgagtggaatggaatggattggaatggaattgaatggaatggattcaaatggaatggactggaatggaatggactcgagtggaatagactagaatggaatggactcgaatggaatagacaggaataaaatggaatagaacggattgtaatcgaatggaatgaaatggaatggaatggataggaatggactcgaatgcaatggagtcgagtacaatggaaccgaatggaatggaatcgaatggaatgcaagtgaatggaatcaaaatgaatagaatggaatggggtggaatagaaacatatcgaatggaatgcaaaggaatggaatggactcgaatggaagggacaggaatggaatggactcgaatggaatggactggagtcaaatggactcgaatggaaagggaacgaatggaatgtaatggaatggaaaggagtagaatggaatggaatcagatggaaaaaatggaatggcatggagtcgattggaattgaatcgaacggaatggcatcgaatggaatgtaatcaaatggaatggaatggactcgaatggaatggactcgagtggaatagaatagaatggaatggcatcgaatggaatcgaatggaatggaatgcaatggacccaaatgcaatggactcgaatgaaatggaatcaaattgaatggactcgaaaggaatggtttcaaacggaaatattcgtatagaatggaatcgaatggaatgcaatattatggaatagaatcgaatgtaatgtaattgaatggaatgtaccggaattgaatggactggaataaaatggactcgaatataatggattacaaagtaattgattcgaatggaatggaatcaaatggaatatattaaaatggaacggaatggaatgcaatggaatggaatagaatgcaatgcaatggaaaggaacgcagtagaatcgagtggaagggaatagaatggaatggaattgaatgcaatcgactggaatggaagggactcgaatggaatggattggaacaaaatggaatcgaaggattggaatcgaacggaacggaatggaatgccctggaatggaatggaatctaaaggaatggaatcagatgaaatggaattgaatggacttgaaaggaatagaatggaatggagtgtaatggaaagatagcaaatgaaatggaatggaaaggaatggactcgagtggaatggactggaatggaatggactcgaatggaatggcctggagtggaatgcactcgaatggaacagacaggagtggaatggactcgaatggaatagaaacaaatggaatggaatggaatgcaaaggaatagaaaggaatggaatcagatttaatgaaatggagtggaatggagtcaaatggaatagaattgaatggaatggcatcaaatggaatggaatggaatggaatggaatggaatggaatggaatggaatggaatggaatggaatggattcgaatggaatggactcgaatggaatagaatctaatggaatggcatcatatggaatggaatggaatggagtggaatggaatggaatggaatggaatagatccaaatgtaaaggacttgaatggaatggactcaagcagaatgaagaagaaagcaatggtctcgaatggaatttattcaaatagaatggaatcaaatggaatgcaatagcatggaatggaatcgaatggaatggaatcaaattggatggaccggaatggagtggactggaatagagcagactcaaatattattgattgcaaagtaattgattggaatggaatggaatcgaatggaatgtattcaaatggaaaggaatggtatgcaatggaatggaatagaatggaatgcaatgtatttgaaaggagtggaatcgagtggactggaattgaatcaaatggaatcaaatggaatggaatcgaatggaatggaattgaatgcaatggaattgtacggaatctaaaggaatagaatggaattgactgtaatggaaagatatagaatgaaacggaatggaatggaatggactcgaatggaatggactggaaatgaatggactcgaatggaatggagtggagtggaatggacccgaatgtaatggaatcgaatggaatgtaaaggaatagaatggaatggaatctgatggaacggatggaatggaatggagtcgaatggaatagagtcaaaaggaaaggcatcaaaggaatggaatggaatggcatcgaatggaatggaaacgagtggacacaaatgtaatggactcgaatggaatggactcaaatagaatggactcgaaaggaatggtaacgaatggaatttattcaaatagaatgtaattgaaaggaattcaatagtatagaatggaatggaatcgaatggaatggaccggaatgaaatggactggaatagaatggactcgaatgtaatcgactgcaaagtgattgttttcaatggaatggaatcaaatggaatggaatcaaaaaggaatggaatggaatgcaatggaatggaatagattgaaatacaaaacaattgaatggagtggaatcgagtggaatggaatagaatggaatggattcgaatgcaatggactggaatggaatggactcgaatggaatggactggaacaaaatggaattgaaatgattggaatcgaatggaaccgaatagaatggaatggaatggaatggacacgaagggaatggagtcaaatggaatggaatcgaatgcattggagtggaatggaatggaattgaatggaatcaaaagaaatagaatagaatgaagtgtaatggaaagatatcgaatggaatggaatgaaatggactcaaatttaatagactcgaatgtaatggaccggagtggaatggactcgaatggaatggaaacgaatggaatggaaaggaatagaatggaatggaattggatggaacggaatggaatggaatggagtcgatataaacagaatctagtggaatgacctcgaatggaatggaatggaattgaatggaatggactcgaatggaatagaatcgaatggtatgacattgaatggaatggaatggaatggaatttaatggacccaaaagtaatggactcgaacggaatggactcaagtagaatggactcgaaaggaatggtctcgaatggaatttattcaaatagaatggattcgtgtggtatgcaatagcatggaatgaaatcaaaaggaatagaaacgactggaatgtataggaagggaatggactagaatacaacagactcgaatgtattggattgcaatgtaattgatatgaaaggaatggaaatgaatggaatgtaatcaaatggaatggaaaggtatggaatggactggaatggaatggactcgcatggaatggactggaacaaaatgtaatcgaacagattggaatcgaatggaacagaatgcaatggaatgcaatggaaggcactggaatggaatggagttgaatggaatggaaccgaatggaatggaaacgaatggaatggaattgaatggaatggaaaggaatagaatggaatggagtacaaaagaaagatattgaatggaatggaatggaatggaatggaatggaatggaatggactcgaatggaatagactggaatggaatggactcgaatggaatggactggagtggaatggactctaatggaacgaaaatgaatggaatggactggaatggaaaggagtagaatggaatagattcggatggaatgaaatggaatggaatggagtcaaatggaatacaaatgaaaggaatggcattgaatggattggaatggaatggaatggaatggaatcgaatggaatggactcaaatggaatattatagaatggaatggcatcgaatagaatggaatgcaatgtaattgaatagaagggaatagacccaaatgtaatggactcgaatggaatggactcaaatacaatggacttgaaaggaatggtctcatatggaatttattctaatagaatggaatcaaatggaatgcaatagtattgaatggaattgaatggaatggaatcaaaaggaattgaccagaattgaatggactggaatagaacagagtcgaatgcagtggattgcaatgtaattgattcgaatggaatggaatcgaatggaatgtaatcaaatggaatggaaaggaatgcaatggaaaggaatagaatggaatgcaatggaatggaacggagtggaatcgagtggaatggaatcgaatggaatggaattgaatggaatggaatcgaatggaatggactggaatggaatgcactcaaatggaatggattggaataaaatggaatcgaacaggttggaatcgaaaggaacgcaatggaatggaatggaatggactcgattggaatgcagtcaaatggaatggaatcaaatggaatggaatcaaatagaacggaattgaaaggaatcgaaagaatagaacaaattttagtgtaatgcaaagatattgaatgtaatggaatggaatggaatggactcgaatggaacagactaaaatggaatggactcgaatggtagggtctggagtagaatggactcgaatggaatggaaacgaatataatggaatggaatgaaatggaaaggaatagaatgaaatgtaatcggatggaatggagtcaaattgaatggacttgaaggaatagaatagaatggaatggcattgaatggattggaatggattggaatggccttgataggaatggtctagaatggaatagaatggaatggaatggactcgcatggaatggacccaaacgtagtggactcgaatggaatggactcaaatagaatggattaaaaagaaatggtatcgaatggaatttattccaatggaatggaatcgaatggaatacaattgtatggaatggaatcgaatacaatggaatcaaatggaatggaccggaatggaatggactggaatagaacagactcgaatgtaatgcatggcaatgtaattaatttgaatggaatcgaatggaatggagtcaattggaatggaatctaaaggaatggaatcgaatgaaatagaattgaacggaatcgaaagtactagaatggaatggagtgtaaaggaaagaaatcgaatggaatggaatggagtggaatggaatggaatggacacgaatggaatggactggaatggaatggacttcaatggaattggctgtagtggaattgactccaatagaatggactggactggaatggactcgtatggaatggaaataagtggtatggaatggaatggaatggaatggaatggaatggaatgcaacggaaaggaatagaatggaatggaatcggatgaaacagattggaatggaatggagtcgaatggaatagaatcgaaaggaatggcatcagacggattggaatggaatggaatggaatggactcgaatggaatggacacgaatggaatagaattgaatggaatgacatcaaatggaatggaatgcaatggaatgggatggaatggaatggaatggaatggaatggaatggaatggaatgtacccaaatgtaatggactcaaatggaatggattcaaatagaacggaatcgaaagaaaaggtctcgaagggaatttaatcgaatagaatggaatcaaatggaatgcaatagtatggaatggaatcgaatgtaatggaatcaaacggaaaagtccagaatggaatggactggaataaaacggactcgaatgtaatggattgcaatctaattgattcgaatggaatggaatccaatggaaaggaccggaatggaatgggatggaatagaacggattcgaatgtaatggattgcaatgtaattgattcgaatggaatggaattgaatggaatgtaagaaaatgaaatatgaatgaatgaaatagaatggaatagaatggaatgcaacggaatggaatagaatgcaactgagtggaatggaatagaatggaactgagtggaatggaatcaaatgcaatggtctgcaatgcaatggactccaatggaatggactggaacaaaatggaatggaacggattggaatcgaaaggaacggaatggaatggaatggaatggactcgaatggaatggagtcgaatgtaacggaatcgaatggaattgaatcaaatggtttggaattgattggaatcgaaaggaatataatggaagggagtgttatggaaagataacaaatggaatggaatggaatggactcgaatggaatggaatggaaagcaaaggactcaaatggaatggactggagtagaatggacccgaatgaatggaaacgaatggaatggaatggaaaggaatagaatggaatggaatcagatggaatgtaatggaatagaatgaaacggaatggcgttgaatggaatagaatcgaatggaatggcatcgagtggaatggaatggaatggaatggaaaggagtggactcgaatggaatgtattcgtattgcttggcatcgaatggaagggaatggaatggaatagaatagaatagaatagaatagaatggaatggaatggagtggaatctagtggaatacaatcaaacggaacggaattgaatgcaacggaatcgaatggaatggagacgcatggaattgactggaacaaaacggaatcgaacggattggaatcaaactgaacggaaaggaatggaacggaatggaaaggtctcgaatgcaatggattcgtactgaatggaatccaatggaatggactggaatggaatggactcgaatggaatgaactggaacaaaatgtaattgaacggattggaatcgaacagagcagaatagaatggaatggaatggcatggactcgaatggaatggggtcaaatagaatggaatcgaatggaatggagtcgaatggaatggagtcaaatagaatgtaatcaaatggaatggactcgaatggaatagatttgaatgcaatggaattgaatcaaatggaatgaaatggcatggaatggaatggacaaaaatgtaatggactggaacggaatggactcaaatagaatggacttgaaaggaatgttctcgaatggaatttattcgaatagaatcaaatcatatggaatgcaatagtatggaatggaatagaatggaatagaattgaatggaatggacaggaatggaatggactggaatagaatggactcgagtgtaatggattgcaaagtgatttgaatggaatggaaacgaatggaatgtaatcaaatggaatctaatggtatccaatgaaatggaattgaaaggaatgcaatggaatggaacggagtggaatcgagtggaatggaaacgaatggaatggaatcgaatggaatggaatcgactggaatggactggaatggaatggaatcaaatggaatgcagtcgaatggaatggaatcaaaatgaatgtagtcgaatggaaaggaatcgaatggaatggaattgaatagaatcgaaaggaatagaatggaatggagtgtcatggaaagatatcgaatggactggaaaggaatggactcgaatggaatggactggaatggaatggactagagtggaatagactggagtggaatggattcgaatggaatggaaacgaatggaatggaatggaaaggaataaaatggaatggaaacggatggaatggaatggaatggattggagttgaatggaatagaatcgaatggagtggcatcgaagagattggaatggaatggaattgaatggaatggactcgaatggaatagaatagaagggaatggcatcaaattgaatagaatggaatggaatggattggacccaaaagtaatggactcgaatggaatggactcaaatagaatggactcaaaagtaatggtctcgaatgtaatttattcaagtagaatggaatcaaatggaatctaaaagtatggaatggaatcgaatggaatggaatcgaatggcatggaccggaattgaatggactggaatagaacggactcaaatataatggattgtaatgtaattgattcgaatgcaatggaatcgaatggaatgtaatccaatggaatggaatggaaagaaatgaaatagaatagaatggaatgcaatggaatggaatggagtggaatcgagtggaatggaatcgaatggaatagaatcgaatagaatggaatggagtaaatagggctgcaatggaatggactcgaatggattagactggaagaaaatggaatcgggtagattggaatcgaacggaacggaatggaatggaattgattagaatggagtggaatggaatggaatagaatggaatggaattgaatagaacggaattgaatggaatcaaaaggaatagaatgaattggagggtaatggtaagatatcgaatggaatggaatggaatgcaatggaatgcaatggaatggactcgaatagaatggactggaatggaatggactcgaatggaatagaatggagtggaatggactcaaatggtatgaaacgaatgtaatggaatgcaacggaatggaaaggaatagaattgaatggaatcggatggaatggaatggaaagaaatgaagtcaaatggaatagaatagaatggaatggcatcgaatagactggaatggaatggagtggaatggaatggactcgaattgaatggattcaaatagaataaaatagaatggattgacattgaattgaatagaatggaatggattggactccaatggaatggactggaatggaatggactcgaatggaatagactggaagaaaatggaatcgaacggattggaatcaaatggaacggaatggaatggaatggaatggaatgcactcaaatggaatagggtctattggaaaggaatcgaatggaatggaatagaatggaatggaattgaatggagtcgaaaggaatagaatctaatggagtgtaatggaaagatatctaatggaatagagtcgaatggaatggactggaatggaatgcacttgaatggaatggactgaattggaatatactcgaatggaatggaaacgaatggaatgaaatggaatggaaaggaatagaaaggaatggaatcagaaggaacagaatggactggaaaggagtcgaatggaatagaatcgaatggaatgacattgaatgcaatcgaatggaatcgaatggaatggacacgaatggaatagaatagaatggaatggcatcgaattgaatggaatggaacggaatggaatggaattcaatggacccaaatgtaatggacttgaatggaatggactcaaatagaatggacccgaaaggaatggtctcaaatggcatttattagaatagaatggaatcgaatggaatgcaatagtatggaatggaattgaatggaatagaatcgaatggaatggaaaggaatggaatgtactggaatagaatggactcgaatgaaaaggattacaatgtatttgatttgaatggaatggaaagtaatcaagtggaaggtaatggtatgcaacggaatggaatagaatggtatgaaatggaatggaatgctgtcgaattgagggaatggaactgaatggaatggaattgaatggaatggactggaatggaattgactcgaatggaatggactcgaatggaatggactgaaacaaagtggaatcgaatggattggaatcgaacggaatggaatggaatggaatagaatggactcgaaaggaatggagtcaaaaggaatggaatcgaacagaattgaatcgaatgaaatggaattcaatggcatcgaaaggaatagaatggaatggagtgcaaaggaatgctatggaatggaatggactcgaatggaattgactcaaatggaattgactggagtggaatggactcgaatagaatggactgtagtggaatgggctcgaatggaatggaaagaatggaatggaaagaatacaatggaaggaaatcggatggaacggaatggagtggaatgaagtcgaatggaatagaatcgaatggaatggcatcaaatggaatggaatggaatggattcaaatggattggactcaaatgaaatagaatcgaatggaatggaatcaaatgtaatggaatgaaatggaattcatccaaatgtaatggtctcgaatggaattgacacaaatagaatggacaagaaacgaatggtctcgaatggaatttattcgaatagaatggaatcgcatggaatgcaatagtatggaatggaattgaaaggaattgaatagaatgcaatggaccggaatgcaatgcaatggaatagaatggactcaaatataatggattgcaaagtaattgattcgaatgcaatggaatcgagtggaaggtactcaaatggaaaggaatggtatacaatggaatggaatagaatggaatgcaatggaatggaatggagtggaatcgagtggaatggaattgaatagaatggaatcgaatggaatggaattgaatggaatggaatcgaatgcaatggaattgaatggtaactaaaaaaatagaatggaatagagtgtaatggaaagatatcaaatgaaatgcaatggactcgaatggaatggacaggaaaggaatggactcaaatgaaatggactagagaggaatggactcaaatgtaatggaaacgaatggaatggaatggaatgaaacggaaaggaagagaatggaatggaatctgttggaatggaatggaatggagtcgaaaggaatagagtcgaatggaatggcatcaaagggaaaggaatggaatggaatggactcgagtagaatggactcaaatggaatagaattgaatggaatggcatcgaatggaatggaatgaaatggaaccaaatgtaatggactcgaatggaatggactcaaatagaatggactctaaaggaatgctctcgaatggaatttattgaaatagaatggaatcgaatggaatgcaatagtatggaatgcaatcgaatggaatggaatcaaatggaatggactggaatggaatggactggaatagaacagactcgaaaataatggattgcaaagtaattgattcgaatggaatggaatcgaatggaatgtaatcaaaaggaatggaatgcaatgcaatggaatggaatagtatgaaatgcaaaggaatggaacagagtggaatagagtggaatggaatagaatggaatggaattgaatggaatggactggaatggaatggactcgaatggaatggactggaacaaaacggaatcgaacggattggaatcaaatggaacggaatagaatggaatggaatggaatggactcgaattgaatggagtcgaatgaaaaggaatcaaatggaatggaggcgaattgaatggaattgaagggaatcgaaaggaaaagaatgcaatggagtgtaatggaaagatatcacatggaatggaattgaatggacacgaatggaacggactcgaatggaatggaccggagtggaatggactcgaatggaatggaaaagaatggaatggaatggaaaggaacagaatggaatggaatcggttggaatggaatgcaatggaatggagtcgattggaatagaatcgaatggaatggcattgaatggaatcaaatggaatcgaatggaatggaatcggttggaacggaatgcaatggaatgtagtcgattggaatagaattgaatggaatggaattggttggaatggagtgcaatggaatggagtcgattggaatagaatcgaatggaatggcatcgaatggaatcaaatggaatcgaatggaatgactcgaatggaatagaatagaatggaatggcatagaatggaatggaatggaatggaatggaatggaatggaatggacccaaatgtaaaggactctaacggaaaggagtcaaatataatggactcgaactgaatggtcttgaatggaatttattcgaacagaatggaactgtgtggaatgcaatagtatggaatggaatcgaatggaacagaatagaatggaaaggactggaatagaatgcactcgaatgtaatggattgcaatgtaattgatttgaatggaatggaaatgaaaggaatgtaatcaaatggaagggaaaggtatgcaatggaatggaacggagtggaatcgagtgtaatggaatcgaatggaatggaattgaatggaacggaatcgaatggaatggactggaatggaatggactcgaagggaatggaaaggaacaaaatgtaattgaacagattggaatcgaacgtaacagaaaggaatgggatgaaatggaatggactcgaaaggaatggagtcgaatggaatggaaccaaatggaatggaattgaatggaattgaaaggaatataatggaatggagtgtaatggaaatatatgaaatggaatggactcaaatggaatcaactggaatggaatggactcgaatggaatggagtggagtggaatggactcgaatataatggaaacgaaaggaaaggaatggaatggaaaggaatagaatggaatggaatcggttagaacggaatggaatcaaatgaagtcgaacaaaatagagtcgaacggaatggcatcgaatggattggaatggaatggaatggaatggattctaatggaatggactcgaatggaatagaaaagaatggaatggcattgaatggaatggaatggaatggaatggaatggaatggaatggaatggaatggaatgaactggacccaaatgtaatggactcgaatggaatgaactcaaatagaatggactcaaaacgaaaggtctcgaatggaatttattcaaatagaatggaaacaaaaggaatgcagtagtatggaatggaatcgaacgtgatggaatcgaatgaaatggactggaatggaatggactggaatagaacggactcgaatgtaatggatgacaatgtaattgattcgaatggaatggaatcgaatggaatctaaacaaaaggtatggaatggaatgcattggaatggatagaatctaacgcaatggaattgaatggagtggaatcgagtggaatggaattgaaaggaatggaatcgaatggaatggaatcgaatggagtggaatggaatggaatggaatagatacgaatggaatggactggaacaaaatggaatcaaacagattggaatcaaacggaacagaatggaatggaacagaatggaatggaatggaatggactcgattggaatggagtcgaatggaatggaatcgaaggaaatggaatcaaataaaacggaattgaatggaatcaaaacatagaatgaattggagtgtaatggaaagacatcgaaaagaatggaagggaatggactcgaatggaatggactggaatggaatggactcgaatggaattgactggagtggaatggactcaaatggaatgcaaacaaataattggaatagaatggaaattaatacaatggaatggaatcggatggaatggaatggagtcaaatagaagagaatcgaatggaatgacgttgaatggaatggaatggaatggaatcaaatggaatagactagaatggaattgaatagaatgcaatgacatcgaatggattggaatgcaatgcaacagactccaatggaatgatccagaatggaatagaatgtaatggaattgaatggcatggaacgaactcaaatgtaatggactcgagtggaatggactcaaatagaatgcactcaaaagcaactttctcgaaagtaatttagtagaatagaatggaatcgtatggaatgcaatagtatggagtggaatagaatggaatagaatcgaatggaatggacaggaatggaatggactggaatagaacggactcgaatgtaatggattgaaatgtaattgatttgaatggaatggaattgaatggaatataaacacatagaatggaatggtatgcaatggaatggaatagaaaggaatgcaatggaatggaacggagtggaatcgagtggaatggaatcgaatggaatgtaatcaaatggaatggactggaatggaatggagtcgaatggaatggactggaacaaaatgtaatcgaacggatttgaatcgaacagaacggaatggaatggaatggaatagactcaaatggaatggagtcgaatggaatggaaccaaatggaatgtaatcgaatggaatggaattgaatggaatcgaaagtaatataatggaaaggagattaatggaaacatatacaatggaatggaaaggaaaggaatgtactcgaatggaatggactggaatggaatggactcgagtggaacggagtggagtggaatgtactcgaatggaatggaaacgaatggaatggaatggaatggaatggacacgaatggaataaaatcgaatggaatggcatcgaattgaatggaattgaacacaatggaatggaatggaatggaatggaatggaatggaatggaatggaatggacccaaaggtaagggactcgaatggaatggactcagatagaatggactcgaaagcaatggtctcgaatgcagtttattcgaatagaatggaatcaaatggaatgcaatagtgtggaatggaaatgaaaggaatagaatagcatggaatggataggaatgcaacgtactgtaatagaacggactctaacgtaatggattgcaatgaatttgatttgaatggactggaacagaatgaaatgtaatcaaatggaatggaatggtatgcaatggaatggaatagaatggaatgaaatggcatggaacgcagtggaattgagtggaatggtattgaatggaatggaatcgaatggaatggactggaatggaatgactcgaatggaatggattggaaaaaatggaatcgaacagattggaatcgaatggaacgtaatggaatggaatggaatggaatcaaatcgaatggaatggagtcgaatgaattggaattgaatggaatggaatcgaatgaattggaattgaatggaatcgaaaggaatagaatggaatggagagcagtggaaagatatcgaatggaatagaatggagtcaaatggaatggactagaatggaatggactcgaatggagcggactggagtggaatggactcgaatggaatggaaacaaatggaatggaatggaatggaatggaatgcaatggaatggaatgcaatggaatgcaaataaatagaatggaatggaaacggatggaatggaatggagtggaatagagtcgaatggaatagaatcgaatggaatggcatcaaatggaatggaatggaatggaatggaatggatttgaatggaatagaatcgaatggaatggaattgaatggaatgaaatggaatggaatgaaatggaattgacccaaatgtaatggacttgaatggaatggactcaaatagaatggataagaagggaacggtctcgaatggaatttatgcgaatagaatagaattccatggaatgcaaaagtacataatgcaatcgaatggaatggaccggattggaatggactggaatagaaaggactcgaatataatggattgcaaagtaataatttcgaatggattggaatcaaatggaatgtaatcaaatgcaatggaatggtatagaattgagtgcaatggaatggaatggagtggaatcgagtggaatggaaatgaatggaatggaattgaatggtatggactggaatgcaatggacatgaatggaatggactggaacacaatggaatcgaacgtaatggaatcgaatgaaaaagaatagaatttaatggaatggaatggactcaaatagaatggagtagattggaatggaaacgaatggaatggaataaaaaggaatggaatcaaaaggcatagaatggaatggagtgtaatggaaagatatccaatggaatggaatggaatggactggaatggaatagactcaaatggaatggactggagtggaatggacccgaatggattggaatggaatggaatggtatggaatggaaaggaatagaatggaatggaatcggatggaacggaatggaatgaaatggagtcgaatgtaatagaatcaaatggaatggcatcaaatggcatggaatggaatggattcgaatggaatggacttgaaaggaatagaatcaaatggaatggcttcgagtggtatggaatggaatggacccaaatgtaatggacgtgaatggaatggactcaaatagaatggactctaaaggaatggtatcgaattgaatttattcgagtagaatggaatcgaatggattgcaatattatggtatggaatcaaacggaatggaatcgaatggaatgtaccggaatggaatggactggaatagaacggactcgaaagtaatggattgcaatgtaattgattcgaatggaatgtaatcaaacggaatgtaatcaaatggaatggaatggaatggaatagaatggaatgcaatggaatggaacagaacagagtggaattgacaggaatggaatcgagtggaaaggaacagaatggaatggaatggagtcaaatggaatagaatcaaatggagtggcattaaatggaattgaatggaatggaatggactctaatggaatggacacgaatggaatacaatggaatgaaatggcatcgaatggaatggaatggaccctaacgtaatggagtcgaataaaagggactcaaatagaatggattcgaaaggaatggtctcgaatgaaatttattcgaatagattggtattgaatggaattcaatagtatggaatggtctcaaatgaaatttattcgaatagattggtattgaatggaattcaatagaatggaatggtattgaatggattggaattgaatggaatggaccggaatggaatggagtggaatagaacgtactccaatgtaatggattgcaatgtaattgattcgaatggaatggaatcgaatggaatgtaatcaaatggaatggaatggaatgcaatggaatggaatggaatagaatgcaatgtaatggaatagaacggaatgcaatggaatggaacagagtggaatcgagtggaaaggaattgaatggaatggaatcgaatggaatggactcaaatggaatggactcgaatggaatggactctaatggaatggtctcgaatggaatttattcgaatagaatggaatcgagtggaatgcaatagtacagaacggaattgattggaatggaatcgaatggaatgtagcgggatggaatggactggacaaaatggaattgaatggcacggaatggaattgaatggactggaatggaatggagtcgaacggaatggaatcggatgtaatggaaacgagcagaatggaattgaatggaatcaaaaggaatagaatggaatggagtgtaacggaaggaaatcaaatggaacggaatggaatggactcgaatggaatggactggaacaaaatggaatcaaatggattggaatcgaatggaaccgagtggaaaggagtggattggaatggaatggaatggaatggaatggagtcgaatggaatggaatcgaatggaaaggaagagaatgtaatggaatcaaatggaatggaattgaaaggaatcaaaaggaatacaatggaatgaactgtaatggaaatatatcgaatggaaagtaacagaatggaatggacacgaatggattggactggaatggaatggaatgaacttgaatggaatggactggagtggaatggtcttgaatggaatagaatctaatggaatggcatcaaatggaatggaatggaagggaatggaatggacacaaatataatggactcgaatggaatggactcaaactgaatggacacaaaagtaatggtctcgaatggaatttattcgaatgcaatggattcgaaaggaatgcaatagtatggaatggaaacaaatggaatggaatcgaatggaatgtaggggattggaatggactggaatacaatggacttaaatgtataggattgcaatgaaattgactcgaatggaatggaatcaaatggaatgtaatcaaatggaatggaatggaatgcaatggaatggaatacaatggaatgcaatggaatggaatgcagtggaatcgagtggaatgaaatcgaatggaatagaattgaatggaatggactgcaatggaatgtactcgaatggaatggacaaggaacaaaatggaattgaacagtttttaatcgaacggaatggaaaggaatggaatggaaaggactcgaatagaatggagttgaacagaatggaccagaatggaatggactggaatagaacggactcgaatgtaatggactgcaaagtaattgattcgaacggaagggaatcgaatggaatgtaatcaaatggaatggaatggaatgcattgcaatggaatagaatggaatgcaatggaatggaagggagaggaatcaactggaatggaattgaatggaatggaattgaatggaattgaatcgaatggaatggacagaatggaatggattcgaatggaatggactggaacaaaatggaaaagaacggattggattcaaaaggaattgaatttaatggaatggattgtattcaaaaggaatggattctaatggagtggaattgaaaggaatcgaaaggaatagaatggaatggagtgtaagggaaagatatcgaatggaatggagtggactccaatggaatggaatggagtgtaatggaaagatattgaatggaatgaaatggaagggagtggactcaaatggaatggaatggactcgaacggaatggactggagtggaatggactagaatgtaacggaaacgaatggaatggaatggaatggaatgaaaaggaaacgaatggaattgaaaggaatgaaatggaaaggaatagaatggaatggaatcagatggagtcgaatggaatagaatcgaatggtatggcatcaaatggaatggaatggattgtaatggaatgaactcgagtggaatggaatcgaatggattagaatcgaatggaagggaattcaatggaatggaatggaatggacccaatagtaatggacttcaaaggaatggactcataaagaatggactcgaaagaagtggtatcaaatggaatttatttgaaaagaatggaatcgaatggaaagcaatagtatggaatggaatcgaatgtaatggactggaatggaatggtctggaataaaacggactcgaatgtaatggattgcaatgtaattgatttgaaaggaaaggaatcgaatggaatgtattcaaaaggaatggaatggaatgcagtagaatgcaacagaatggaatgcaaaggaatggaatggagtgaaatcgagtggaatggaatcgaatggaatggaattgaatggaatggaatcgaatggaatagactcgaatggaatggaattgaatggaatggaatcgaatggaatagactcgaatggaatggactggaacaaaatggaagggaaccgattggaatcgaaaagaatggaatcgcatggaatggaatggaaaggatttgaatggaatggagacgaatggaatggaaccgaatggattggaatctaatggaatggaattgaaaggaatcgaaacgaatagaatggaatggagtgtaatggaaagatatcgaatggaatggaattgaaatgaattgaaaggaatagaatagaatggagtgtaatggaaacatatcaaatggaatggagtgcaatggactcgaatgcaatggaatgcaatggaatggattggaatggactcaaatgaaatggactggagaggaatggacaagaatggaaaggaaaagaatggaatggaatggaaaagaatggaatggaatggagtggaaaggaatagaatggaatggaattggatggaatgcaatggaatggaatgtagtcgaatggaaaacattcgaatggaatggcatcaaatggattagaatagaatggaatggaatggaatggactccaatggaatggactcgaatggaatataatcaaatggaatggcatcgaatggaatggaatggaatggaatggaccaaaagtaatggaatcgaatggaatgggctcaaatagaatggactcaaaaggaatggtctcgaatggaatttatttgaatagaatgtaatcgaatgtaatgcaatagtatggaatggattcgaaaggaaaggaattgaatggaatgaaccggaatggaatggactggaatagaacagactcaaatgtaatggattgtaaggtaattgattcgaatcgaatggaatcgaatggaatgtaatcaagtggaatggaatggaatacaatggaatggaatagaatggaatgcaatggaatggaacgtagtggtatcgagcagaatggaatcgaatggaatggaacggaatggaatggactacaatggaaaggactggaattcagtggactggaacaaaatggaatcgaacggattggaattgaatgaaacggaatagaatggaatgcaacggacacgaatggaatggagtcgaatggaatggaaccgaatggaatggaatcgaagggaatggaatcaaatggaagggaatataatggaatcgaaaggaatagaatgcaagagagtgtagtggagagatatcaaatggaatagaacagaatggaatggactcaaaaggaattgactggaatggaatggactcgaatggaatggacttgcgtggaatgcattcgaatggaatggactgaagtggaatggattcgaatggaatggaaacaaatgcaatggaatgaactggataggaatggaatggaatggaaagaatagaatggaatggaatcggttagaatggaatgcaacggaatggacttgaatggaatagaatagaagggaatggcatcgaattgaatagaatggaatggaatggattggacacaaaagtagtggactcgaatggaatggacttgaaaggaatggtctcgaatggaatttattcaaataggatggaatcgaatggaatgcaatagtatggaatggagtcgaatggaatggaatcgaatggaatgtagtgggatggaatagactggaacaaaatgaaatcgaaaggattggaaccgaatggaatggaatggaatggaatggaatggaatgaactcgaatacgatggagtcaaatgggatggaatcgaatggaatggaattgaatggaatcgaaaggaatagaatggaatggagtgtaacggaaagatatcaaatggaatggaatggaatggactcgaatggaatggactggaacaaaatgaaatcaaaaggattggaatcgcagggacccgaatggaaaggaatggattggaatggactcgaatggaatggagtcgaatggaatggaatcaaatggaatggaatcgaatggaatggaattgaatggaatcaaaaggaatagagtggaatggagtgtaatgtaaagatatcgaatggaatggaatggaatggactcgaatggaatggactggaagggaattcactcgaatgcaatggacttgagtggaatggactcaaatggaatggaaacgaatggaatggaatggaaaggaatagaatggaatggaatcagatggaacggaatggaatggaatggagacgaatggaatagaattgaatggaattgcatcaaatggaatggaatggagtggaatggaatagaagggacttgaatggagtggagtcaaaaggcatagaatctaatgtaatggcatcaaatggaatgccattgaatggaatggtcccaaatgtaatggactcgaatagaatggcctcgaaagaaatgatctgaaatggaatccgtatgaatagaatggaatcgaatggaatgcaataatatgcaatggaattgaatagaaagaaatcgaatggaatgatccggaatggaatgaactggaatacaacggacacgaatgtaatggattgcaatttgattgattcgaatggaatggaatcgaatggaatttaaccaaatgaaatggaatggaatgcaatggactggaatagaatggaatgcaatggaatggaacagactggaatcgagtggaatggaatcaaatggaatggaagcaaatggaatggaattgaatgaaatggactggaaaggaatggagtcgaatggaatgtactggaacaaaacggaatcgaacagattggaatagaatggaacggaatggaatgcaatggacacgaatggaatggagtctaatggaattgaatggaaagtaatggaatcaaatggaatgaaattgaatggaaacgaaaggaatagaatggaatggagtgtaatggaaacatatcgaatgcaatggaaatggaatggcctcgaatggaatggactagaatggaatgggcttgaaaggaatggaccggagtggaaaggagtcgaatggaatagaaacgaatggaatggaatggaatgcaatggaatggaatggaaaggaatagaaatggaaaggaatcggagggaatacaatggatgggaatggagtctattggaatagaatcgaatggaatggcatcgaatggaatggaatggaaaggactcgaatggaatggactctaatggaatagaacggaatggaatggaatggaatggattggaatggaatggaatggaatggacccaaatgtaatgggcttgaatggaatggacacaaatagaatggactcgaaagaaatagtctcgaatggaattaattcgaatagaatggaatggaaaggattgcaatattatggaatggaatataatggaatggaatcaaatggaatggaacggaatggaatggactggaataaaactgactcgaatgcaatttattgcaatgtaattgattcgaatggaatggaatcaaatggaatggaatcaaatggaatggaatcaaatggaatgaaatcgaatggaatggaatggaatgcaatggaatggaatagaatggaatgcaatggaatggaacggagtggaatcgagtggaatggaatcgaacgtaacggaatcgaatggaatggactggaatggaatggactggaataaaatggaattgtacgaattggaatcaaacagaacggaatgcaatggaatggaatggaatggactcgaatggaatggagtcgaatggaatggagtcgaatggaatggaatcgaaaggaatggaacctaatggaatggaattgaatggaatcgaaaggaaaagaatggattggagtgtaatggaaagatatcgaatggaatggaatggaatggactcaaatggaatgcactggaatggaatggactcgaatggaatgcactggagtggaatggactcgaatggaatggaaacgaatggaatggaatggaatttaaaggaatagagtggaatggaatggaatagaaagtaatggaatggaatggagtcgaatggaatggagtcgaatggaatagaatcaaatggaatggcatcaaatggaatggaatggaattgaatggattcaactggaatggactcgaatggaatagaatataatagaatggcatcgaaagcaatggaatggaatgaaatggagtggaattgaatggaccaaaacgtaacagactcgaatggaatggactcaaaaagaatggtctcaaaagtaatgatctcgaaaggaatttattcgaatagaatggaagcgaaaggaatgcaatagtatggaatgaaatcgaacggaatggactggaatggaatggacaggaagagaacggactggaatataatggattgcaatgtaattgattcaaatggaatggaatcgaatggaatgtaaacaaatggaatggaatggaaagcaatggaatggaatagaatgaaatgcaatggaatggaactgagtggaattgagtggaatgtaattgaatggaatggaatcgaatggaatggaatcaaattaaatggactggaatggaatggacttgaatggaatggaatggaacaaaatgcaatctaatggactggaatcgaatggaacggaactgaatggaatggaaaggaacggaatggaatggaatcaaacggaatggagtcaaacgcaatggaatcgaatggaatagaatagaatggaatggaattcaatggaatcaaaagaaatagaatggaatggagtcgaatggattggaatctaatagaatggaatagaatggaatggaccggaatggaatgtactggagtagaatggactcgaaagaaatggattgcaaggtaattgattcgaatggaatggaatcgaatggaatgtaatctaacggagtggaacgcaatggaatgcaatggaatggaaaagaatgtaatggaatggaatggaacggagaggaatcaagtggaatggaatcaaatggaatggaattgaatggaatggaatggaatcgaatggaatggactggaacggaatggaatcaaatggaatggactgtaacaaaatggaatggaactgattggaatcgaacagaaaggaatggaatggaatggaccccaatggaatggagtcgaatggaatggaattgagtggaatgcaattgaatggaatcaaatgaaatagaatggaatggagtttaatggaaagatatctaatgaaatggattggaattgaatggaatggactgcaatggaatggactggaatggaatggactggagtggaatggactcgaatggaatggaaacgaattgattggaatggaatttaatggaatggaatggaaaggaatcgaatggaatgaaatcagatggaacggaatggaatggacagagtggaatggaatggaatgcaatggaatggaatggaaaggaatacaatggaatggaatcggaaggaatggaatggaatttaaaggagtcaaatgcaatagaatcgaatggaatggcatcgaatggaatggaatggaatggattcgaatggaatggaaacaaatggaatggaaaggtatagaatggaatggaattggatggaatggaatgcaaagaaatgaagtcgaatggaatacaattgaatggaatggcatggaatggaatggaatggaatggaatggaatggaatggaatggaatggactcgaatggaatagaatagaatggaatggaactaaatgtaatgaacttgaaaggaatggactcaaatagaatggaatcgaaaggaatggtcttgaatggaatttattcgaatagaaaggaatcgaatggaatgcaatagtgtggaatggaatcgaatggaatggaatcaaatggaatggaccgaaatggaatggactgacatagattggactcgaatgtaatggattgcaatgtattaaattcgaatggaaggaaatcaattggaatgtaatcaaatggaacggaattgaatgcttgaaatggaatagaatgtaatgcaatggaatggaatagactggaatggaatgtaattgaatgcaatgtaatcaaatgtaatggaaaggaatgccatggaatggaatagaatggaatgcaatgcaaaggtatagaatggaatgcaatggaatttagtggaatggagtcaaatggaatgcaatagaatggaatggcatccaatggaaaggaatggaatggactcaaagggaaagcacatgaaaggaatataatataatggaatggcatcgaatggaatggaatggaatggaatgcagtgaaatggaaagatataaaatggaaaggaatggaatggactcaaacggaatatactgaaatggaacggacttgaatggaatggactggaatggaatggactcgaaaggaatggaaacgaatagaatggaatggaatggaaaggaatagaatggaatggaatcggatggaatggaatggaaaggaacagaatcgaatggactagaattgaatggaatggcatcgaatggagtggaatggattggaatggaatcgaatggaatggactcgaatggaatacaatcaaaaggaatggcatcgaaaggattggaatggaattgaatggaaggaactcgaatggaatagaatcaaatagaatggcatgcaatggaagggaatagaatggaatggacccaaatgtaatggactctaaaggaatagactcaaatagaatgaactcgaaaggaatggtctcgaatggaatgtattcgaatagaatggaatcaaaaggaatgcaatagtttggaatggactcgaatggaatggaatcgaatggaatggaccggaatggaatggactggaacagaatggactcgaatgtaatggattgcaatgctattgatttcaatggaatggaatagaatggaatgtaatcaaatggaattgaatggtatgcaatggaatggaatggaatagaatggaatccagtgtaatggaatcgaatggaatggaatcaaatggaagggaatcaaatggattggactgtaatggaatggactcgaatggaatggactgaaataaaatgtaatcgaacggattggagtcaaagtgaacagattggaaatgaatggaatggaagggaaaggacttgaatggaatggaaccaaatggaatctaatggaatgtaatcaaatggaaaggaatagaatacaacggaatggaatagaatggaattcaatagaatggaatagaatggacagcagtggaatggaacagagtgggatcgagtcgattagaaacgaatggaatggaatcgaatggaatggaatcgagtggaatggaattgaatggaatcgaaaagaaaagaatggaatcaaaaataatagaatggaatcaagtgtaattcaaagatatcgaatttaaagggaatggaatgaaatggactagaatggaatggaatggacttgaatggaatggacaggagaggaatggactcgaatggaatggaaactaatggaatggaatagattggattggaatagaatgtaatggaatggaaaggaaaagaatggaatgtaattggatggaatggaatggaatggaatggagtcgaatggaatagaatccaatggaatggcatcgaatggattagaatggaatggaatggaatggaatggaatggaatggactcgaatggaatggacacgaatggaatagaatcgaatggaatgtcatggaatggaatggaatggacccaaatgtaatggaatcgaatggaatggactcaaatagaatggacccaaaaggaatggtcttgaaaggaatttattcgaattgaatggaatgaaatggtatgagatagcacggaatgcaatcgaatggaatggaagcgaattgaatggagcggaatggaatggacaggaacagaatggtcacgaatgtaatgtattgcaatgtagtagattcaaatggaatggaattgaatggaatgtattcaaatggaatggaacggaatgcaacggaatggaataaaatggaatgcaatggaatggaacacagtggaatcgagtggaatggaatcaaatggaatggaattgaatggaatggaacggaatggaatggattcgaatagaatagactggaaaaaattggaatcgaacggattggaatcaaacggaatgggatggaacggaatggaaaggaatggaatggaatcaaatggaatggagtcgaatggaatggaatcgaatagaatggaattgaatttattcaaaaggaatagaatggaaaggagtgtaacggaatgataaccaatggaatggaatttaatggaatggactcaaaaggaatggactggggtggaatggactggaatggaatggactcgaatggaatggactcaaatggaatggactggagtggaatggactcgaatggaatgcaaacgaatggaatggaatgcaatggaatggaatggaaaggaatagaatggaatggaatcggatggaatagaatggaatggaatggagtcaaatggaatagaattgaannnnnnnnnnnnnnnnnnnnnnnnnnnnnnnnnnnnnnnnnnnnnnnnnnnnnnnnnnnnnnnnnnnnnnnnnnnnnnnnnnnnnnnnnnnnnnnnnnnnnnnnnnnnnnnnnnnnnnnnnnnnnnnnnnnnnnnnnnnnnnnnnnnnnnnnnnnnnnnnnnnnnnnnnnnnnnnnnnnnnnnnnnnnnnnnnnnnnnnnnnnnnnnnnnnnnnnnnnnnnnnnnnnnnnnnnnnnnnnnnnnnnnnnnnnnnnnnnnnnnnnnnnnnnnnnnnnnnnnnnnnnnnnnnnnnnnnnnnnnnnnnnnnnnnnnnnnnnnnnnnnnnnnnnnnnnnnnnnnnnnnnnnnnnnnnnnnnnnnnnnnnnnnnnnnnnnnnnnnnnnnnnnnnnnnnnnnnnnnnnnnnnnnnnnnnnnnnnnnnnnnnnnnnnnnnnnnnnnnnnnggaatcgaatggaatggaatcaaagggaatggaccggaaaggagtggactggaatagaacagacacgaatgtaatgcattgcaatgtgtatgattcgaatggaatggaatcgaatggaatgtaatcaaatggaatggaatggaatgcaatggaatggaacagaacggaatgcaatggaatggaacgcagtggaatcaagtggaaaggtatcgaatggaatggacttgaatgcaatggactggaattgaatgcagtcgaatggaatggagtggatcataatggaatcgaatggattggaattcaatggaatggaatggattcgaatggaatggagtcaaatggaatggaatcgaatggaatggaatttaatagaattgaattgaatgaaatggaattgaatggaatcaaaaggaataaaatggagtggagtgtaacggaaagatatcgaaagaaatggaatggaatggaatggactcgaatggaatggactggaatgcaatggactcgaaaggaatggaatggaatggaaaggaaaagatggaatggaattggatggaacggaatcgaatggaatggagtcgaatggaatataatcaaatggaatggaatggaatggaatggaatggaatggattcgaatggaatggactcgaatggaatagaatcgaatggaatggcattgaatggaatggaatggaatgcacccaaatataatggactcgaatggaatgaactcaaatagaatggacttgaaaggaatggtttcgaatggaatttattcgaatagaatggaatagaacggaatgaaatagtatggaatggaatcgaaaggaattaaatagtatggaatggaatcaaattgaatggaatcgaatggaatgcaccagaatggaatggactggaatagaacggactcgaatgtaatggattgcaatgtaattgattcaaatggactggaatcgaatggaatgtaatcaaatggaatggaatggaatgctatggaatgcaatagaatggaatgcaatggaatggaacggagtggaatcgagtggaatggaattgaatggaatggaattgagtggaatggactggaatggaatgggctagaatgaaatggacaggaacaaaatggaattcaatggattggaatcgaatggaacggaatggaatggaatggaatgcattggaatggaatggaatggaatggagtcgaaagaaatggagtcgagtggaatggaatcaagtggaatggagtcgaatggaatggaatgggattgaatggaattgaaaggaatacaatggaatggagtgtaatggaaagatattgaatggaatggagtgtaatggaaagatattgaatggaatggactcgaatggattggactcaaatggaatggactggagtggaatggactcgaatggaatggatcggagtggaatggagtcgaattgaatggaaacgaatggagtggaatacaatggaatggaatggaatggaatggaaaggaaaggaatagaatggaatggattcgtatggaaagtaatggaagggaatggagtcgaatggaatagaatcgaaaggaatggcatcaaatggaatggactggaatggaatggactcgaagggaatataatcgaatgaaaaggcatcgaatgtaatggaatggaatggcatggaatggaatggactcgaagggaatataatcgaatgaaaaggcatcgaatgtaatggaatggaatggcatggaatggaatggaatggactcgaagggaatataatcgaatgaaaaggcatcgaatgtaatggaatggaatggcatggaatggaatggaatggaatggacccaaatgtaatggacacgaattgaatggactcaaacagagtggaatcgaaagaaatggtctcgaatgaaatctatttgaatagaatggaatcgaatggaatgcaatagtatggaatggaatcgaatggaatggaattgaacggaatggaccagaatggaatggacaggaatagaacggactcgaatgtaatgaattgcaataaaattgattcgaatggaatggaatcaaatggaatgtaatcaaatggaatggaatggaatgcaaaggaatggaatggaatggaatgcaaaggaatggaatagaatggaatgcaatggagtggaacggagtggaatcgagtggaatggaatcgaatggaatgtaattcaatggaatggacttgaatggagtggactagaatgtaatggacaggaacaaaatggaattgaactgattacaattgaacggaagggaatggaatggaacggaatggaatggaatcgaatggaatggaatcaaatggaatggaattgaatggatacgaaatgaatataatggaatggagtgtaatggaaagatatcgaatggaaaggaatggaaagggctcaaatggaatggactggaatgaaatggtctcgaatggaatagactggagtggaatggactcgaatgcaatggaaacaaatggaatggaatgctacggaatggaatggaaaggaatagaatggcatggaatcaaatggaatggaatggaaggctatggagtcgaatggaataaaatcgaatggaatagcatcgattggaatggaatggaatggattcgaatggaatggactggaatgaaatggcatcgaatagaatggactggagtgaaaaggaatcgaatggaatggactggaatggaacggactcgaatagaatggaattgaacggaatggaccagaatggaatggacaggagtagaacggactcgaatgtaatgaattgcaataaaattgattcgaatggaatggaatcaaatggaatggaatggaatgcaaatgaatggaatagaatggaatgcaatggaatggaacggagtggaatggagtggaatggaatcgaatggaatggaattcaatggaatggacttgaatggagtggactagaatgtaatggacaggaacaaaatggaatcgaactgattaaaatcgaacgaaacagaatggaatggaacggaatggaatggaatcgaatggaatggaatcaaatggaatggaattgaatggatatgaaacgaatagaatggaatggagtgtcatggaaagatatcgaatggaaaggaatggaaaggactcaaatggaatggactggaatgaaatggtctcgaatggaatagactggagtggaatggcctcgaatgcaatggaaacaaatggaatggaacgcaacggaatggaatggaaaggaatagaatggaatggaatcagatggaatggaatggaagggaatggatttgaatggaataaaatcgaatggaatggcatcgattggaatggaatggagtggactccaatggaatggactggaatggaatggcatcgaatagaatggactggagtgaaaaggaatcgaatggaatggactggaatggaatggactcgaatggaatggaaacaaatggaatggaatggaatggactcgaatggaatggagtcgaatggaatggaatcgaatggaatcgaatcaagtggaaataagtcgaatggaatggactggaacaaaacagaatcgaatggataggaatcgattggaacaggatggaatgggatggaatggaatgcaatggaatgaaatggaatggaatggaatggattacaatggaatggagtcgaatggaatgcaatcgaatttaagtgaaaggaatagaatggaatggagtgtaaaggaaagatatcaaatggaatggaattaaatggaatggactcgaatggaatggactggaatggagtgcactcaaatggaacggaatggaatggaatggactctagtggaatggactggagaggaatagactcgaatggaatggaaacgaatggaatggaatgcaaaggaatggaatggaaaggaatagaatggaatggaatcggatggaacggaatgtaatggaatggagtcaaatgaaacagaatcgaatggaatggaattggatggaatggaatggaatggattggagtcgaatgaaatagaatagaatggaatggcatcaaatggaatggactggaatggaatggaaaggactcgaatcgaatgaactcaaatggaataaaatcgaatggaatggcatcgaatgtaatgtaatggaatgtcatggaatggaatggacgcaaatgtaatggactcgaaaggaaaggactcaaatagaatggactcgaaaggaatggtcttgaatggaatttattcgaatcgaatggaatcagatggattgccattgtatggtatgcaatcgaatggaatggaaacgaatggaaaggaccggaatggaatggactgaaaaggaatggactcgaaagaaatgtattgcaatgtaattgaattgaatggaatggaatcgaatggaatgtaatcaaattgaatggaatggaatggaatggaatggaatgcaatagaatggaatgaaatggaacagaatacaatggaatgcaatggaatggaatggagtggaatcgagtgcagtgcaatcaaatggaatgagttcgaatggaatggaatcgaatggaatggactccaatggaatagaatagaatgggatggcatcgaatgaaatggaatggaatggaatggaatggaatggattgaaatggaatggaatggacccaaatgtaatggactcgaatggaatggactccaatagaatggactcgaaattaatggtctcgaatggaatttattcgaatagaacggaatcaaatggaatgcaattgtatggtatggaatcgaatggaatggaagcgaatgtaatggaccagaatggattggactggaatagaatggactcgaatgaaatgaattgcaatgtgattgattcaaatggaatggaatctaatggaatgtaatcaaacggaatggaatggaatgcaatggaatgcaatagaatggaaagcaatggaacggaatacaatggaagacaatggaatggaagagagtggaatcaagtgcaatggaatcaaaaggaagggaattgaatgaaatgaaatcgaatggaatggactggaatggaatggactctaatggaagggactggaacacaatggaatcgaacggatcggaatagaatggaatggaaaggaatggaatggaatggaatggactcgattggaatggagtcgaatggaatggaattgaatggagtggattcgaatagaatggaactgaatggaattgataggaatagaatggaatggagtgtaatggaaagatatcaaatggaatggaatggaatggagtgtaatggaaagatatcaaatggaatggaatggaatggactcgaatggaattgactggaatggaatggactcgaatggaatggactggagtggaatggacttgaatgtaatggaaacgaatggaatagaatgtaatgaaatggaaaggaatacaatggaacgtaataggatgggacaacatggaatggaatggagtcgaatggaagagaatcgattggaatggcatcgaatggaatggaatggaaaggaatgaagtggaatggactcgaatggaatggacacgaatggaatggcatggaatggaatggaatagaatgtacccaaatgtaatcaactcaaatggaatatactcaaatagaatggactcgaaaggaatgatctcaaatggaatttattcgaatagaatggaatcgaatggaatgcaatagtatggaatggaatcaaatagaatggaccagaatggaatggactggaatagaactgacttcagtgtaatggattgcatggtaattgattcaaatggaatggaattgaatggaatgtaatcaaatggtatgatatggaatgcaattgaatggaatagatggaatgcaatggaatggaacggagttgaatcaagtggaatggaatcgaatggaatggaatccaatggaatggactggaatggaatggactcgaatggaatggactggaacaaaatggaatagaatgtattggattcgaatggaaaggaatggaatggaatggaagggatttgaatggaatggagtcgaatggaatggaatcgaatggaatggaatcagttggaatggaattcaatggagtcgaaaagaacagaaaggaatggagtgtaatggaatgatattgaatggaatggaatgtactcgaatggaatggactggaatgaaatgtactctattgaaatggacaggagtggaatggacacaaatggaatggaaatgaatggaatggaagggaatggaaaggaattgaatggaatggaatttgatggaacggaatggaatggaatggggtcaaatggaatagaatcaaatggaatggcattgaacggaatggaaacgaatggaatggaatagcaaggaatggaatggaaaggaatataatggaatggaatcggatggaatggaatggaatggaatggaatggaatggagtcgaatggaatagaatcgaatggaattgcatcgactggaatggaatggaatggactcgaatggaatggactctaacggaagagaatcgaatggaatggcgtcgaatggaatggaaaggaatggaatggaatggacccaaatataatggactcgaatggaatggaatcaaatagaatggacgcgaatggaatggtctcgaatgtaatttatttgaatggaatggaatagaaagtcattcaatattatggaatggaatcgaatgaaatggaattgaatcatattaaccggaaaggaatgtactggaatagaatggactcgaatgtaatggataaaaaagtaattgatttgaatgccttggaatcgaatggaatgaaatcaaatggaatggaaaggaatacaatggaatggaatagaatagaatgcaaaagaatggaacggagtggaatcgagtggaatggaatcgaatggaatggaatggaatcaaatggaatggagtcgaaaggaactgaatggaatggacgggaacaaaatggaatcgaacggatgggaatggaatggaatggactcgaatggaatggagtcaaatggaatggcgtcaaatggaatggaattgaatggaatgcaatcgaatcaaatggaattgaatagaatcgaaaggaaaagaatggaatggagtgtaatggaaggacagcgaatggaatggaatggaatggactcgaacagaatggactggaatggaatggactcgaatggaatggactggagtggaatggactcgaatggaatggaaacaaacggaatggaatggaatggaaaggaatagaatggaatggaatcggatgaaacgaaatggaatggaatggagttgaatgtaatagaatccaatggtatggcttcaaatggactggaatggaatggaatggaatgcaatggaatggaacggaatgaactcgaaaggaatggactcaaaagaaatagagtcgaaaggaatggactcgaatggaatggaatgtaatagaatggaatgcaatggaatggaacggagtcgaatcgagtggaatggaaccgaatggaatggattataatggaatagatacgattggaaaggactggaatggaatggattcgaatggaatggactggaacaaaatggaattaaacggattggaatcgaatggtacggaatagaatgtaatggaatggaatggactcgaatggaatggagtcgaatgtaaaagactctaatggaatggactggaatggaatggatggactggaatggaatggaaaggaatagaatagaatggaatcggttggaacagaatggagtggaatggagtcaaatagaatagaatcgaatgcaatggcatctaatggaatggaatggaagggactcgaatggaatggactcgaatgcatagaatcaaaaggaatggcaacgaattgcatcgaatggaatggacccaaatgtaatggacttgaatggaattgactcaaatagaatggactcgaaagcaatggtctagaatagtatttacttgaatagaatggaatcgagtggaatgaaatagtatggaatggaatcgagtggaatgtaatcttatgaaattgaccggaatggaatggacaggaatagaatggactcgaatgtaatggattgcaatgtaattgatttgaatggattggaatcgaacggagcataatccaatggaatggaatggaaagcaatggaatggaatagaatggaatgcaatggaatggaatggagtggaatcgagtggaatggaatcgtgtggaatggactggaatggaatggcctcgaatcgaatggaatggaataaaatggaatcgaatggattggaattgaatggaatggaatggaatggaatgggatgacacgaatggattggagttaaatggaatggaatcgaatggaatgagattgaacggaatggaattgaatggaatctaaatgaatggaatggaatggattgtaatggaaagttatcaaatggaatggaatggaatggaatggactcgaaaggaatggactcgaatggaatggactggagtggaatagactcgaatggaattgaccggagtggaatgggctcgaatggaatggaaacgaatggaatggaatggaatggaaaggaatagaatggaatggaatcgcacggaatggaatggaatggagtcgaatggaatagaaaagaatggaatggcattgaatggaatggaatggaatggaatgcaatggaatggaatcgaatagaaagaaatagtatagaatggaatagaatggaaaggaatcaaatggaatggaacggaatggaatggactggaatagaaaggactcgaatgtaatggattgcaatgtatttgattcgaatggaatggaatccaaaggaatgtaatcaaatataatgaaatggaatagaaaggaatgcaatggaatggaatggagtggaatcgagtggaatggaatcgaatggaatggaattgaatggaatggactggaatggaaaggacttgaattgaatggattggaaaaaaaatggaattgaaaggattggaatcgaacggaacggaagggaagggaatttaatggaatggactcgaatggaatggattggaaaaaaatggaactgaaaggattggaatcgaacggaacagaagggaagggaatttaatggaatggactcgaatggaatggagtcgaatgaaatggaatcaaatggaatggaattgaatggaatcgaaaggaatagaatggaacggagtgtaatagaaagaaatcgaatggaatggaatggaatagaatggaatggattggaatggaatgaactcgaatggaacggagtggagtggaatggactcgattggaatggaaacaaatggaatggaccggaatggaatgtattggaatagaatggactccaatgtaatggattgtaatataattgatttgaatggaatggaattgaatggaatgtaatcaaatggaatggaatggtatgcaatgtaatggaatagaatggaatgcaatggaaaggaagggaggggaatgtagtggaatggaatttaatggaaaggaatcgaattgaatggactggaattgaatggactcgaatggaatggacaggaaaaaaatggaatcgaacggattggaatcaaacggaatggaatgggatggactcgcatggaatggagtcgaatgaaatagaaaagaatggaatggaatcgaatggaatggaattgaatggaatcgaaaggaatagaatggaatggagtttaatggaatggaatagaatggaatggagtgcaaaggaaagatattgaatggaatggaatggacccgaatggaatggactggaatggaatggactggagtggaatggactcgaatggaatggaatggaatggaatggaaaggaatagaatggaatggaatcggatgcaatgaaatggaatggaatggagtcgaatggaatagaattgaatggaatggcattgaatggactggaatggcatggaaaggaatggactcgaatggaatggacttgaatggaatagaatagaatggaatgacatcgaatggaaaggaatggaatggaatgaaatggaatggacccaaatgtaatggactcgaaaggaatggactcaaatagaatggactcgaaaggtatgggctcgaacgaatttattcgattagaatggaatcgaatggaatgcaattgtatgaaatggaattaaagagaaactaatcgaatggaacagacatgaatggaatggactggaatagaacggacccaaatgtaatggattacaatgtaattgatatgaatggaatggaatcggttggtatgtaatcaaatggaatggaatgtaatgcaatggaatggaatagaatggaatggaatcgaatggaacggaggggaatcaagcggaatggaatcgaattaaatggaatccaatggaatggaatcgaatgtagtggactcgaatggaatggaatggaaaaaaatggaatcaaacagattggaatctaacggaacggaatggaatggaatggaatggaatggaatggagtcgaacggaattgaaaggaatggaatctaatggaatggagtcgaatggaatagaattgaatggaatggaacggaatggaatagactcgaatggaatggatttgaatggaatagaatcgaatggaatggtatcgaatggaatggaatggaatgcaatggaatggaatggacccaaatgtaatggactcaaatggaatggactcaaatagaacggaatttaaaggaatgttctcgaatggaacttattcaaatagaaaggaatcgaatggaatgcaatagtatggaatggaatcgaatggaatggaattgaatggaatggaccggaatggaatggaatgtaatagaaaggactcgaatgtaatggattgcaatgtaattgattcgaatggaatggaatcaaatggaatggaatcgaatggaatggactggaatggaaatgactggaatagaacgtacacgaatggaatggattgcaatgtaattgattcgaatggaatggaattgaatggaatctaatacaatggaatggaagggaatgcaagggaatggaatagaatggaatgcaatggaacggaacggagtggaattgagtggaatggaatcgaatggaatggactgtaatggagtggaatcgaatggaacggaatggaatggaatggaatggacttgaacagaatggagtcaaatgaaatggaatcgaatggaaaggaatcaaatggaatggaaatgaatggaaacaaaaggaatagactggaatggagtgtaatggaaagatattgaatggaatggaatggaatggactcgaatgggatggactggaatggaatggactcgaatggaatggactggagtggaatttactcgaatgaaatggaaaagaacggaatggaatggaatggaatggaaaggaatagaatggaatggagtcagatggaatggaatggaagggaatggagtagaatggaatagaatagaaagtaatggcttcgaatggaatggaatggaatggactcaaacggaatggaatcgaatggaatggcatcaaatggaatggaatggaatggacccaaatataatggattcgaatataatggaatttaatggaatggacttgaaagcaatggtctcaaatggaattcattcaaatagaatggaaactaatgtaatccaatagtattgaatggaatcaaatggaactgaatcgaatggaatggaccagaatggaatggactggaatagaagggactcgaatgcaatggatttgaatgtaattgattcaaacggaatggaattgaatgaaatgtaatcaaatggaatggaatggaatgcaatggaatggaagagattggaatgcaatgaaatggaagagagtggaatcgagtggaatggaatagaatggaatggaatcgaatggaatggaatcaaatggaatggactggaatggaatggaatcgaaaggaatggacttgaacaaaatggaatggaattgattggaatctaatggaacggaatggaatggaatggaatttaatggactcaaaaggaatggagtcgaatggaatggaattgaatggaatggaatagaatggcatggaattgaatggaattgcaaggaatagaatggaatggagtgtgctggaaagatactgaatggaatggaatggaatggaatggactcgaattaaatggactggaatggaatggaattgaatggattggaatggagtggaatggactctaatggaatggaaaagaaaggaatggaatggaatagaatggaatggaatggaaagaatagaatggaatggtttcggatggaatggaatggaatggaatggggtctaatggaatagaactgaatggaatggcattgaatggaatggaatcaaaaggaatttactcaaatggaatagaattgaatggaatgtcatcgaatggaatggaatgaaatgaaatggaatggagtggaaaggacccaaatgtaatggactcaaatggaatggactcaaatagaatggactcaaactgaatggactcaaaaggaatggtctcaattggaatttattagaatagaatggaattgaacggattgcaatagtatggaatggaatcgataggaatggaatcgaatggattggaccagaatggaatggactttaacagagtggactcgaatgtaatggattacaatgtaattgatttgaatggaatggaatcgtatggaatgttatcaaatggaatggaatggaatgcaatggaatggaatagaatggaatgcaatggaatggaatggagtggaatagagtggaatggaatcgtgtggaatggactggaagggaatggaatcgaatggaatggactggaacaaaatggaatcaaacggattggaatggaatggaatggaatggaatggactcgaatggaagggggtcaaatggaatggaatcaaacggaatggaatcgaatgtaatggaattgaatgaaatcgaaaggaatagaatggaatggagtttaatggaaaggtattgaatgcaatgttatggaattgaatggactcgaatggaatggactggaatggaatggaatcgaatggaatggactcaaattgaatggaaacgaatggaatagaatggaatggaatgcaatggaatagaaaggaatagaatggaatggatttggatggaaaggaatggaatggaattgagacgaatggaatataatagaatggaatagattcgaatggaatggcatcgaatggaatggaatggaatggaatggaatggaatggaatggaatggaccgaaatgtaatggactcgaatggaatggactcaaatagaatggacttgaaaggaatggtctcgaatggaattgacccgaatagaagggaatcgaatggagtgcaatagtatggaatgaaatcgaatggaatggaattgaatggaatggaccgcaatgcaatggactgtaatagaatggactcgaatgtaatggattgcaatgtaattgagtcgaatggaatggaatcgcatggaatgcaatcaaattgaatggaatggaatgcaatggaatggaatagattggaatgcaatagaatggaatggagtggaatcgagttaaatggaatcgaatggcatggaatcgaatgtaacggactggaatgaaatggaatcgaatggaatggactggaaaaaaatagaatcaaacggattggaatcgaatggaacagaatggaatggaatggaatggactcgattgcaatggagtcgaatggaatggaattgaatggaaaagaattgaatggaatcgaaaggaatagaatggaatggagtataatggaaagaaatcgaatggaatggaatggaataaactcgaatggaatgaactagaatggattataatagaaacatatagaatggaatggagtagactcgaatggaatgaactggaatggaatggactcgaatggaatggatgggagtggaatggaatcgaatgtaatggaaacgaatggaatgcaatggaatgaaatggaatggaaaggtatagaatggaatggaatctgatggaatggaatggaatgaaatggagtcgaatggaatagagtcgaatggaatggaatcgaatggaatggaatggaacagaatggaatggacccaaatgtaatggactcgaatggaatggactcaaacacaatggactcgttagggatggtctcgaatggaatttactcgaatagaatggaatcgaatggaatgcaatagtatggaatttaatcgaatgaaatggaaacaaatggaatggtccggaatggaatagactggaatagaatggacgccaatgtaatggattgcaatgtaattgtttcaaatggaatggattcgaatggaatataatctaatggaatggaatggaatgcaatggaattgaataaaatggaatggactcgaacaaaatggaatagaatggattggaatcgaatggaacagaatggaatggaatggaatggaaagaacccgaattgaatagagtcgaatggaatggaatcaaatggaatggaatcgaagggaatggaattggatggaatcaaaaggaatagaatggaatggagtataatggaaagacatcgaatggaacagaatggaatggaatggactcgagtggaatgggctggaatggcatggactcgaatggaatggacaggagtggaatggactcaaaagcaatggaaacgaatggaatggaatggaatggaaaggaatagaatggaatggaattggatggaacggaatggaatggagtcaaatggaatagaatcaaatggaatggcattgaatggaatggaatggattgtaatggaatagaatggaatggactcgaatggaagataatcgaatgtaatggcaacgaatggaatggaatggaatggacccaaatgtaatggactcgaatggaatggactcagatagaattgactcaaaatgaatggtctccaatggaattcattcaaatagaatggaatcgaatataatgcaatagtatggaatggaatcgaatgtaatggaattgaaaggaatggacaggaatggaatggattggaatagaatggactcgaatgtaatggattgcaatgctattaatttgaatggaatggaatcgaatggaatggtatgcaatttaatggaatagaatggaatgcaatggaatggagtggaattgagttgaatggaattgaatggagtggaatcgaatggattggactggaatggaacggactcgaatggaatggactggaacaaaatggaatggaacggattggagtctaattgaacggaatggaatttaatggtatggaatggaaaggactcgaatggaatggagtcaaatggaatggaaccgaatggaatcgaatggaatgtaatcaaatggaaaggaatggaaggcaatggagtggaataatatggaatgcaatggaatggaatggagtggaatcgagtggaattgaattgaatggaatggaatcgaatgtaatggactcaaatggaatggacttgggaaaaaaatggaatcaaacggattggaattgaacagaacagaataaaatggaatggactcgaatgcaatggagttgaatggaatggaattgaaaggtatggaatcgaatgcaatggaattgggtggaatggaattgaatggaatggagggcaatggaaagatatcgaatggaatggaatggaatggacgcgaatggaatggactggaatggaatgggcttgaatggaattgactggagtggaatggacttgaatagaatggactggagtggaatggactcgaatggaatggaatggacatgaatataatggaatggaatcagatggaacggaatggaacggaatgcagttgaatggaatagaatcgaatggaatggcatcaaatggaatggagtggaatggaatggaatggaatggaatggaatggaatggaatggactcgaaaggaatggattctcacggaatatagttgaatggaatggcattgaatggaatggaatggaatgccatggaatggaatggacccaaatgtagtggacacaaattgaatggattcaaatagaacggactcgcaaggagtgggctcgaatggaattcattcgagtagaatcgaattgaagggaatgcaatagtattgaatggaatcaaatggaatggaatcaaatggaatggaccagaatggaatggactggaatagagtggatacaaatgtaatggattgcaatgtaatagattcgaatggaatggaatagaatggattctaatcaaatggaatggaatataatgaatggaagggaatagaatggaatgcaatggaatggaacagagtggtatcgagaggactggaatccaatggaatggaatcaaatggaatggaatcgaatggaatggactgtaatggactcgaatgggatggactggaacaaaatggaattgaatggattggaannnnnnnnnnnnnnnnnnnnnnnnnnnnnnnnnnnnnnnnnnnnnnnnnnnnnnnnnnnnnnnnnnnnnnnnnnnnnnnnnnnnnnnnnnnnnnnnnnnnnnnnnnnnnnactggaatggaatggacttgaatggaatgcactggagtggaatggactcgaatgtaatggatacgaatagaatataattgaatggaaagaatagaatggaatgcaatcagatggaacggaatggaatagaatggagtagaatggaatagaatcgattggaatggcaccgaatggaatggaatctaatggaatggactcgaatggtatggactagaatggaatagaatcgaatagaatggcatcaaatggaatggaatggaatggaatggaatggaatggaatggaaactaatggaatggactcgaatggaatagaatacaatggaatggcatcgagtggaatggaattgaatagaatggacacaaataaaattgactcgaatggcatggactcaaataaaatggactcgaaaggaattgtctcaaatggaatttattcaaatagaatggaatcgaatggaatgcaatagtatggaatggaatcgaatggaatggactggagtggaatggactggaatagaacggactcgaatgtaatggattgcaatgtaattgattcgaatggaatggaatcgaatggaatgtaataaaatggaatggaattgaatgcaatggaatggaatagaacggaatgcaggggaattgaatgcagaggaatccagtggaattgaatggaaaggaatggaatcgaatggaatgaaatcgaatggaatggactcgaatggaagggaatggaaaaaaatgaaatcaaacggattggaatcgaatggaacagaatggaatggaaaggaatggactcaaatggaatgtagacgaatggaatggaaccgaaaggaatggaatagaatagaatggaattgaatggaattgaaaggaatagaatggaatggagtgtaatggaatgatatcgaatggaatggaattgaatggaatggaatggaatggaatggaatggaatggaatggactcaaatgaaatggactcgaatggaatggactggagtggaatgactctaatggaatggaaatgaatgatatggaatggaatggaatggaaaggaatagaagggaatggaatcagatggaacggaatggaatcgaagggagtcgaatgaaattgaatcgaatgcaatggcatcgaatggaatggaatggactcgaatagaatagaatcgaatggagtgacattgaatggaatggaatggaatggaatgggattgaaaggaatgcaccgaaatgtaatggactctaatggaatggactgaaatagaatggactcaaaagggatggtctcgaatggaatttattcgaatagaatggaatcgaatggaatgcaatattgaggaatggaatagaatggaatcgaatggattggaatggaatggaatgcggtgaagtggagtggagtggagtggaatgagatggaatggaattgaatggagtggagcacagtggagtggaatggagtggattggaatggaatgggaaggaatgaaactgaagggtgtgcagtgcagtggactgcattggagtggaatgcagtggagaggaatggaatggagtggaattgaatcgaatcgaactgaatcgaatggaatcaaatggaaaaaatggaattgcatggaatcaaatggaatcgaattgaatggaatcgaaaggcatcaaatggaattgaatggaatgcggtgaagtggagtggagtggaatagagaggaattgaatggggtggaagggaattgagtggagtggagtggaatagagtggaatggaatggggtggaatggaattgagtggagtggagtggaatggagtggaatggaatggactgggaaggaattgaatttaatgtagtggagtagagtggagtggaagggaatgcaatggaatggattggaatggtgaaatgaaatgtgagcggagattgtgaactgaactccagccagggtgacagagtgaggaactgtccaaagaaaggaatggaatggaatggattcagaatgaaatgtaagggaatggaggggagtttagtggattggcgtggagtggagtggagtggagtggaatggagtggaacggaatgggaagaaatggaattcaagagagcggagaggagtggattggagtggagtggagtgaggcggagcggagaggagtggaatggaatggaatagaatcgaatggaatcaaatcaaattgaatcaaatcgaattgaattgaatggattggaatcaaatggaatcaaatggaatcgaatggaatcaaatggaatcgaatggaatcaagtggaatgcaaaggaatcgattggaatggaatcgaatcgcattgaatggaatcaaatggaatgcggtgaagtggagtagagtgtagtggaatgcagtggaatggaatggggtggaatggaattgaatggagtggagtggagtggaatggagtggagtggaatggaatgggaaagaatggaattgaatggagtggagtagagtggagtggaatggaatgcaatggattggaatggaatggaatggtgaaatgaaatgtgagctgagattgtccaatgcactccagcttgggtgacagagtgagatcctgacgaaaaaaaggaatggtatagagtggatttagaatggaatgtaatggaatggagtggagtggagtggagtggattggagtggaatgaaatggagtggtatggattgttatggaatggaatggattggagtggagtggagtggggtggagtggagtggagtggaatggagtggaatggaatgggatggaacaaaatggagtagtgtagagaggataggtgtagaatggaatggaaaggaatggagtttagtggagtggagttgggtggagtggaatcaaatggagtggaatggagtggagtggaatggagtggagtggaatgtagtggaatggagtggagtggagtgaagtggaatggaaaggagtagactggaatggattggagtgaagtggaatggactggggtggagtggaattgactggagtgggaaaaaatggaatggagtggaatggaatagagtggagagtaatggaatggagtggaatgtagtggagtggagtagtatggagtgcaaaggaatggaatggagtggagaggaatggagtggcagggagtggagtggaatggagtggagtggagtggagtggagtggactgaagtggagtgcaatggagtggaatggaatggaatgggaaaaatggaattgaatggagtggagtggaatgcaacgcaacggaatggaatggtgaaataaaatgtgagctgagattgtgcactgcactccagcctcagtgacagagtgagatcctgctgaaagaaaggaatggaatggaatggatttagaatgcaatgtaatggaatggaatggagaggagnnnnnnnnnnnnnnnnnnnnnnnnnnnnnnnnnnnnnnnnnnnnnnnnnnnnnnnnnnnnnnnnnnnnnnnnnnnnnnnnnnnnnnnnnnnnnnnnnnnntaattccctttccaccacaggcctcaaagccctccaaatatccacttgcagattctagagaaagagtgtttcaaagcttgtctctcaaaaggaatgttcaactctgtgagttgaatgcaaacatcacaaaggagtttctgagaatgcttctgtttagcttttctgtgaagattatcccgtttccaacgatatcttcaaagaggtccaaatatccacttgcagattccacagaaggcgtgcttggaaactgctggttgaaaaggaaccttcaactctgtgagttgaatgcaaccatcacaaacaagttcctgacaatgcttctctctagtgtctatgtgacgataattcattttccaacacaggcctgaaagctctccaaatgtccacttgcagacagtccgaaaagcatgtttcagaactgctctatgaaaagcaatgtgaaactctgtgaggtgaacgcaaacatgagagagaagtttctgagaatgcttctgtttaatttttatgtgaagatattcccgtttccaaagacatcttcaaagaggtccacatatccacttgcagattccacaaaaagagagattcagaactgctatatctataggagggttcaactctgtgagttgaatgcaatcatcaaagagaagtttctgagaaggcttctgtctagatgttatgtgaagatgtacccgtttcgaacgaaggccacagagtggtccaaatatccacttgcagatcgtacagaaagagtgtttcaaacctgaactatcaaaggaaagtgcaactctttgatctgaatgcaaacatcacaaagaagtttctgagaatgcttctgtttagttaggtgcatttataccgtttccaaagaaatcctcagaaagggccaaatatccacttgcagattctacaaaaagtgtgtttcacacctgctccatccaaaggaatgttcagctctgtgagttaaactcaatcatcacaaagtattttctgagaatgcttctgtctagtttttctatgaagctattccctttactaccatagacctcaaagcgctccaaatctccacttgcacattccacaacaagagtgtttccaaactgctctctcaataggaatgttcaactctgtgaggtgaatgcaatcatcacaaagtagtttctgagaatgcttctatctagtatttatgtgaagatatttccttttccatcccaaacctcaaagccctccaaatatccacttgcagattcaagaaaaagagtgtttcatagctgctctttccgaaggaaagttcaaatctggaatttgaatacaaacagcaccaaggagttcctgagaatgcttccttgtaatttttatgtgaagatgattctgtttccaacgaaaccttcaaagaggtctacatatccccttgcagattccacagaaagagagtttgaaaaccgtgctctcaaaaggagtgttcaaccctgtgagttgaatgcagtcatcacagaaaagtttctgagaatgcttctgtctaggtgttatgtgaagatatacccatttcgaacgaaggccacagattggtccaaatatccacttgtagatcctgcgaaaagagggtttcaaacctgaactttccaaggaaggtgcaactctgggatttgaatgcaaacatcacaaagaagattctgagactgcttctgtttagttagatgaaattaccaagtttccaacgaatacctcagacagctccaaatatccacttgcagattctacagaaagtgtgtttcgaaactactccaccccaaggaaagtacagctctgtgagttcaactctatcatcccagaggattttctgagaaagcttctgtcttgtttatatatgaagttatttcctttactacgataggcctcaaagaagtgcaattatccacttacagtttctacaaaaagattgtttcaaacctgaactatcaaagaaaggttcaacactgtgagttgaatgcaaacatcacgaagaaggttctgagaatacttctgtttagttctgtgtggtttatcccgtttctaacgaaatcctcagagaggcccaaatatccagttgcggattctacaaagagtgtgtttcgaacctgctccatccaaaggaattttcagccctgtgagttaaactcagtcatcacaaagagttttctgagaatgctactgtctagtttttatatgaagctatttcctttactaccataggcctcaaagtggtccatagctccacttgcagattctacacaacgagagtttccaaagtgctctgttaaagtgaatgttcaactctgtgacttgaatgtaatcatcacaaagtagtttctgagaatgcttctatctagtttttacgggaagataattccctttccaccacaggcctcaaagccctccaaatatccacttgcagagtctagagaaagaatgtttcacagcttctctctcaacaggaaagttcaactctgtgagttgaatgcaaacatcacaaagaagtttctgagaatgcttctgtttagcttttctgtgaagattatcccgtttccaacgacatcttcaaagaggtccaaatatccacttgcagattccacagaaagagtgtttggaaactgctgtttgaaaaggaaccttcaactctgtgagttgaatgcaatcatcacaaacaagtttctgagaatgcttctctctagtttttatgtgacgataattcgttttccaacacaggcctgaaagctctccaaatatccacttgcagacactccgaaagcatgtttcagaactgctctatgaaaagcaatgtgaaactctgtgagttgaacgcaaacatcagagagaagtttctgagaatgcttctgtttagtttttatgtgaagatattcccgtttccaaagacttcttcaaagaggtccacatatccacttgcagattccacaaaaagagagattcaaaactgctctatccataggagggttcaactctgtgagttgaatgcaatcatcacagagaactttctgagaaggctcctgtctagaagttatgtgaagatgtacccgtttcaaaagaagaccacagggtggtccaaatatccacttgcagatcgtacagaaagagtgtttcaaacctgaactatcaaaggaaggttcaactctgggatttgaatgcaaacatcacaaagaagtttctgagaatgcttctgtttaggtaggtgccgttatcccgtttccaacgaaatcctcagagaggtccaaatatccacttgcagattccacaaaaagtgtgtttccaaactactctctcaataggaatgttcaactctgtgaggtgaatgcaatcatcacaaattagtttctgagaatgcttctaactagtatttatgtgaagatatttccttttccaccacaaacttcaaaggcctccaaatatccacttgcagatcctagaaaaagagtgtttcatagctgctctttccgaaggaaagttcgactctggaagttgaatacaaacagcaccgaggagttcctgagaatgcttccgtgtaatttttgtgtgaagatgattctgtttcaaacgaaaccttcaaagaggtctacatgtccccttgcagattccacagaaagagagtttcaaaactgcgctctcaaaaggagtgttcaactctgtgagttgaatgcagtcatcacagaaaagtttctgagaaggcttctgtctagatgttatgtgaagatatacccgtttcgaacgaaggccacagagtggtccaaatatccacttgtaggtcctggaaaaagagggtttcaaaactgaactttccaaggaaggtgcaactctgggatttgaatgcaaacatcacaaagaagattctgagactgcttctgtttagttagctgaaattatcccgtttccaacgaattcctcagacaggtccaaatatccacttgcagattctacataaagtgtgtttcgaaactactccatcccaaggaaagtacagctctgtgagttcaactcaatcatcccagaggattttctgagaaagcttctgtcttgtttttagatgaagttatttcctttactagcataggcctcaaagaagtgcaattatccacttgaagtttgaacaaaaagagtgtttcaaacctgaactatcaaagaaaggttcaacactgtgagttgaaggcaaacatcacgaagaagattctgggaatgcttctatttatttctgtgcggtttatcccgtttccaacgaaatcctcagagaggcccaaatatccacttgcagattctacaaagagtgtgtttcgaaacttctccatccaaaggaatgttgagccctgtgagttaaactcagtcgccacaaagggttttctgagaatgctactgtctagtttttacatgaagctatttcctttattaccataggcctcaaagcggtccatatctccactagcagactctacacaacgagagtttccaaagtgctctgtcaaagggaatgttcaactctgtgacttgaatgcaatcatcacaaagtagtttccgagaatgcttccatctagtttttacgggaagataattccctttccaccacaggcctcaaatccctccaaatatccacttgcagattctagagaaagagtgtttcaaagcttgtctctcaaaaggaaagttcaactctgtgagttgaatgcaaacattacaaagaagtttctgagaatgcctctgtttagcttttctgtgaacattatcccgtttccaacgacatcttcaaagaggtccaaatatccacttgcagattccacagaaagagtgtttggaaagtgctgtttataaaggaaacttcaactctgtgagttgaatgctatcatcacgaagatgtttctgacaatgcttctctccagtttttatgtgaccataattcgttttccaccacaggcctgaaagcgctccaaatgtccacttgcagacactatgaaaagcatgtttcagaactactctatgagaagcaatgtgaaactctgggagttgaacacaaacatcacagagaagtttctgagaatgcttctgtttagtttttatgtgaagatattcccgtttccaaagacatcttcggaggggtccacatatccacttgcagattccacaaaaagagagtttcaacactgctctatccataggaggtttcaactctgtgagttgaatgcaatcatcacagagaagtttctcagaaggcttctctctagattttatgtgaagatgtacccgtttcaaacgaaggccacagagtggtccaaatatccacttgcagattctgcaacaagagtgtttacgaactgctctatcaataggaatgttcaactctgttaggtgaatgcaatcatcacaaagcagtttctgagaatgcttctatctagtatttaggtgaagatatttccttttccaccacaaaccacaaagccctccaaacgtccacttgcagattctagaaaaagagtgtttcatagctgctctttccaaaggaaagttcaactctgggagttgaatacaaacatcaccaaaatgttcctgagaatgcatctgtatagtttttatgtgaagatgattccgtttcnnnnnnnnnnnnnnnnnnnnnnnnnnnnnnnnnnnnnnnnnnnnnnnnnnnnnnnnnnnnnnnnnnnnnnnnnnnnnnnnnnnnnnnnnnnnnnnnnnnnnnnnnnnnnnnnnnnnnnnnnnnnnnnnnnnnnnnnnnnnnnnnnnnnnnnnnnnnnnnnnnnnnnnnnnnnnnnnnnnnnnnnnnnnnnnnnnnnnnnnnnnnnnnnnnnnnnnnnnnnnnnnnnnnnnnnnnnnnnnnnnnnnnnnnnnnnnnnnnnnnnnnnnnnnnnnnnnnnnnnnnnnnnnnnnnnnnnnnnnnnnnnnnnnnnnnnnnnnnnnnnnnnnnnnnnnnnnnnnnnnnnnnnnnnnnnnnnnnnnnnnnnnnnnnnnnnnnnnnnnnnnnnnnnnnnnnnnnnnnnnnnnnnnnnnnnnnnnnnnnnnnnnnnnnnnnnnnnnnnnnnnnnnnnnnnnnnnnnnnnnnnnnnnnnnnnnnnnnnnnnnnnnnnnnnnnnnnnnnnnnnnnnnnnnnnnnnnnnnnnnnnnnnnnnnnnnnnnnnnnnnnnnnnnnnnnnnnnnnnnnnnnnnnnnnnnnnnnnnnnnnnnnnnnnnnnnnnnnnnnnnnnnnnnnnnnnnnnnnnnnnnnnnnnnnnnnnnnnnnnnnnnnnnnnnnnnnnnnnnnnnnnnnnnnnnnnnnnnnnnnnnnnnnnnnnnnnnnnnnnnnnnnnnnnnnnnnnnnnnnnnnnnnnnnnnnnnnnnnnnnnnnnnnnnnnnnnnnnnnnnnnnnnnnnnnnnnnnnnnnnnnnnnnnnnnnnnnnnnnnnnnnnnnnnnnnnnnnnnnnnnnnnnnnnnnnnnnnnnnnnnnnnnnnnnnnnnnnnnnnnnnnnnnnnnnnnnnnnnnnnnnnnnnnnnnnnnnnnnnnnnnnnnnnnnnnnnnnnnnnnnnnnnnnnnnnnnnnnnnnnnnnnnnnnnnnnnnnnnnnnnnnnnnnnnnnnnnnnnnnnnnnnnnnnnnnnnnnnnnnnnnnnnnnnnnnnnnnnnnnnnnnnnnnnnnnnnnnnnnnnnnnnnnnnnnnnnnnnnnnnnnnnnnnnnnnnnnnnnnnnnnnnnnnnnnnnnnnnnnnnnnnnnnnnnnnnnnnnnnnnnnnnnnnnnnnnnnnnnnnnnnnnnnnnnnnnnnnnnnnnnnnnnnnnnnnnnnnnnnnnnnnnnnnnnnnnnnnnnnnnnnnnnnnnnnnnnnnnnnnnnnnnnnnnnnnnnnnnnnnnnnnnnnnnnnnnnnnnnnnnnnnnnnnnnnnnnnnnnnnnnnnnnnnnnnnnnnnnnnnnnnnnnnnnnnnnnnnnnnnnnnnnnnnnnnnnnnnnnnnnnnnnnnnnnnnnnnnnnnnnnnnnnnnnnnnnnnnnnnnnnnnnnnnnnnnnnnnnnnnnnnnnnnnnnnnnnnnnnnnnnnnnnnnnnnnnnnnnnnnnnnnnnnnnnnnnnnnnnnnnnnnnnnnnnnnnnnnnnnnnnnnnnnnnnnnnnnnnnnnnnnnnnnnnnnnnnnnnnnnnnnnnnnnnnnnnnnnnnnnnnnnnnnnnnnnnnnnnnnnnnnnnnnnnnnnnnnnnnnnnnnnnnnnnnnnnnnnnnnnnnnnnnnnnnnnnnnnnnnnnnnnnnnnnnnnnnnnnnnnnnnnnnnnnnnnnnnnnnnnnnnnnnnnnnnnnnnnnnnnnnnnnnnnnnnnnnnnnnnnnnnnnnnnnnnnnnnnnnnnnnnnnnnnnnnnnnnnnnnnnnnnnnnnnnnnnnnnnnnnnnnnnnnnnnnnnnnnnnnnnnnnnnnnnnnnnnnnnnnnnnnnnnnnnnnnnnnnnnnnnnnnnnnnnnnnnnnnnnnnnnnnnnnnnnnnnnnnnnnnnnnnnnnnnnnnnnnnnnnnnnnnnnnnnnnnnnnnnnnnnnnnnnnnnnnnnnnnnnnnnnnnnnnnnnnnnnnnnnnnnnnnnnnnnnnnnnnnnnnnnnnnnnnnnnnnnnnnnnnnnnnnnnnnnnnnnnnnnnnnnnnnnnnnnnnnnnnnnnnnnnnnnnnnnnnnnnnnnnnnnnnnnnnnnnnnnnnnnnnnnnnnnnnnnnnnnnnnnnnnnnnnnnnnnnnnnnnnnnnnnnnnnnnnnnnnnnnnnnnnnnnnnnnnnnnnnnnnnnnnnnnnnnnnnnnnnnnnnnnnnnnnnnnnnnnnnnnnnnnnnnnnnnnnnnnnnnnnnnnnnnnnnnnnnnnnnnnnnnnnnnnnnnnnnnnnnnnnnnnnnnnnnnnnnnnnnnnnnnnnnnnnnnnnnnnnnnnnnnnnnnnnnnnnnnnnnnnnnnnnnnnnnnnnnnnnnnnnnnnnnnnnnnnnnnnnnnnnnnnnnnnnnnnnnnnnnnnnnnnnnnnnnnnnnnnnnnnnnnnnnnnnnnnnnnnnnnnnnnnnnnnnnnnnnnnnnnnnnnnnnnnnnnnnnnnnnnnnnnnnnnnnnnnnnnnnnnnnnnnnnnnnnnnnnnnnnnnnnnnnnnnnnnnnnnnnnnnnnnnnnnnnnnnnnnnnnnnnnnnnnnnnnnnnnnnnnnnnnnnnnnnnnnnnnnnnnnnnnnnnnnnnnnnnnnnnnnnnnnnnnnnnnnnnnnnnnnnnnnnnnnnnnnnnnnnnnnnnnnnnnnnnnnnnnnnnnnnnnnnnnnnnnnnnnnnnnnnnnnnnnnnnnnnnnnnnnnnnnnnnnnnnnnnnnnnnnnnnnnnnnnnnnnnnnnnnnnnnnnnnnnnnnnnnnnnnnnnnnnnnnnnnnnnnnnnnnnnnnnnnnnnnnnnnnnnnnnnnnnnnnnnnnnnnnnnnnnnnnnnnnnnnnnnnnnnnnnnnnnnnnnnnnnnnnnnnnnnnnnnnnnnnnnnnnnnnnnnnnnnnnnnnnnnnnnnnnnnnnnnnnnnnnnnnnnnnnnnnnnnnnnnnnnnnnnnnnnnnnnnnnnnnnnnnnnnnnnnnnnnnnnnnnnnnnnnnnnnnnnnnnnnnnnnnnnnnnnnnnnnnnnnnnnnnnnnnnnnnnnnnnnnnnnnnnnnnnnnnnnnnnnnnnnnnnnnnnnnnnnnnnnnnnnnnnnnnnnnnnnnnnnnnnnnnnnnnnnnnnnnnnnnnnnnnnnnnnnnnnnnnnnnnnnnnnnnnnnnnnnnnnnnnnnnnnnnnnnnnnnnnnnnnnnnnnnnnnnnnnnnnnnnnnnnnnnnnnnnnnnnnnnnnnnnnnnnnnnnnnnnnnnnnnnnnnnnnnnnnnnnnnnnnnnnnnnnnnnnnnnnnnnnnnnnnnnnnnnnnnnnnnnnnnnnnnnnnnnnnnnnnnnnnnnnnnnnnnnnnnnnnnnnnnnnnnnnnnnnnnnnnnnnnnnnnnnnnnnnnnnnnnnnnnnnnnnnnnnnnnnnnnnnnnnnnnnnnnnnnnnnnnnnnnnnnnnnnnnnnnnnnnnnnnnnnnnnnnnnnnnnnnnnnnnnnnnnnnnnnnnnnnnnnnnnnnnnnnnnnnnnnnnnnnnnnnnnnnnnnnnnnnnnnnnnnnnnnnnnnnnnnnnnnnnnnnnnnnnnnnnnnnnnnnnnnnnnnnnnnnnnnnnnnnnnnnnnnnnnnnnnnnnnnnnnnnnnnnnnnnnnnnnnnnnnnnnnnnnnnnnnnnnnnnnnnnnnnnnnnnnnnnnnnnnnnnnnnnnnnnnnnnnnnnnnnnnnnnnnnnnnnnnnnnnnnnnnnnnnnnnnnnnnnnnnnnnnnnnnnnnnnnnnnnnnnnnnnnnnnnnnnnnnnnnnnnnnnnnnnnnnnnnnnnnnnnnnnnnnnnnnnnnnnnnnnnnnnnnnnnnnnnnnnnnnnnnnnnnnnnnnnnnnnnnnnnnnnnnnnnnnnnnnnnnnnnnnnnnnnnnnnnnnnnnnnnnnnnnnnnnnnnnnnnnnnnnnnnnnnnnnnnnnnnnnnnnnnnnnnnnnnnnnnnnnnnnnnnnnnnnnnnnnnnnnnnnnnnnnnnnnnnnnnnnnnnnnnnnnnnnnnnnnnnnnnnnnnnnnnnnnnnnnnnnnnnnnnnnnnnnnnnnnnnnnnnnnnnnnnnnnnnnnnnnnnnnnnnnnnnnnnnnnnnnnnnnnnnnnnnnnnnnnnnnnnnnnnnnnnnnnnnnnnnnnnnnnnnnnnnnnnnnnnnnnnnnnnnnnnnnnnnnnnnnnnnnnnnnnnnnnnnnnnnnnnnnnnnnnnnnnnnnnnnnnnnnnnnnnnnnnnnnnnnnnnnnnnnnnnnnnnnnnnnnnnnnnnnnnnnnnnnnnnnnnnnnnnnnnnnnnnnnnnnnnnnnnnnnnnnnnnnnnnnnnnnnnnnnnnnnnnnnnnnnnnnnnnnnnnnnnnnnnnnnnnnnnnnnnnnnnnnnnnnnnnnnnnnnnnnnnnnnnnnnnnnnnnnnnnnnnnnnnnnnnnnnnnnnnnnnnnnnnnnnnnnnnnnnnnnnnnnnnnnnnnnnnnnnnnnnnnnnnnnnnnnnnnnnnnnnnnnnnnnnnnnnnnnnnnnnnnnnnnnnnnnnnnnnnnnnnnnnnnnnnnnnnnnnnnnnnnnnnnnnnnnnnnnnnnnnnnnnnnnnnnnnnnnnnnnnnnnnnnnnnnnnnnnnnnnnnnnnnnnnnnnnnnnnnnnnnnnnnnnnnnnnnnnnnnnnnnnnnnnnnnnnnnnnnnnnnnnnnnnnnnnnnnnnnnnnnnnnnnnnnnnnnnnnnnnnnnnnnnnnnnnnnnnnnnnnnnnnnnnnnnnnnnnnnnnnnnnnnnnnnnnnnnnnnnnnnnnnnnnnnnnnnnnnnnnnnnnnnnnnnnnnnnnnnnnnnnnnnnnnnnnnnnnnnnnnnnnnnnnnnnnnnnnnnnnnnnnnnnnnnnnnnnnnnnnnnnnnnnnnnnnnnnnnnnnnnnnnnnnnnnnnnnnnnnnnnnnnnnnnnnnnnnnnnnnnnnnnnnnnnnnnnnnnnnnnnnnnnnnnnnnnnnnnnnnnnnnnnnnnnnnnnnnnnnnnnnnnnnnnnnnnnnnnnnnnnnnnnnnnnnnnnnnnnnnnnnnnnnnnnnnnnnnnnnnnnnnnnnnnnnnnnnnnnnnnnnnnnnnnnnnnnnnnnnnnnnnnnnnnnnnnnnnnnnnnnnnnnnnnnnnnnnnnnnnnnnnnnnnnnnnnnnnnnnnnnnnnnnnnnnnnnnnnnnnnnnnnnnnnnnnnnnnnnnnnnnnnnnnnnnnnnnnnnnnnnnnnnnnnnnnnnnnnnnnnnnnnnnnnnnnnnnnnnnnnnnnnnnnnnnnnnnnnnnnnnnnnnnnnnnnnnnnnnnnnnnnnnnnnnnnnnnnnnnnnnnnnnnnnnnnnnnnnnnnnnnnnnnnnnnnnnnnnnnnnnnnnnnnnnnnnnnnnnnnnnnnnnnnnnnnnnnnnnnnnnnnnnnnnnnnnnnnnnnnnnnnnnnnnnnnnnnnnnnnnnnnnnnnnnnnnnnnnnnnnnnnnnnnnnnnnnnnnnnnnnnnnnnnnnnnnnnnnnnnnnnnnnnnnnnnnnnnnnnnnnnnnnnnnnnnnnnnnnnnnnnnnnnnnnnnnnnnnnnnnnnnnnnnnnnnnnnnnnnnnnnnnnnnnnnnnnnnnnnnnnnnnnnnnnnnnnnnnnnnnnnnnnnnnnnnnnnnnnnnnnnnnnnnnnnnnnnnnnnnnnnnnnnnnnnnnnnnnnnnnnnnnnnnnnnnnnnnnnnnnnnnnnnnnnnnnnnnnnnnnnnnnnnnnnnnnnnnnnnnnnnnnnnnnnnnnnnnnnnnnnnnnnnnnnnnnnnnnnnnnnnnnnnnnnnnnnnnnnnnnnnnnnnnnnnnnnnnnnnnnnnnnnnnnnnnnnnnnnnnnnnnnnnnnnnnnnnnnnnnnnnnnnnnnnnnnnnnnnnnnnnnnnnnnnnnnnnnnnnnnnnnnnnnnnnnnnnnnnnnnnnnnnnnnnnnnnnnnnnnnnnnnnnnnnnnnnnnnnnnnnnnnnnnnnnnnnnnnnnnnnnnnnnnnnnnnnnnnnnnnnnnnnnnnnnnnnnnnnnnnnnnnnnnnnnnnnnnnnnnnnnnnnnnnnnnnnnnnnnnnnnnnnnnnnnnnnnnnnnnnnnnnnnnnnnnnnnnnnnnnnnnnnnnnnnnnnnnnnnnnnnnnnnnnnnnnnnnnnnnnnnnnnnnnnnnnnnnnnnnnnnnnnnnnnnnnnnnnnnnnnnnnnnnnnnnnnnnnnnnnnnnnnnnnnnnnnnnnnnnnnnnnnnnnnnnnnnnnnnnnnnnnnnnnnnnnnnnnnnnnnnnnnnnnnnnnnnnnnnnnnnnnnnnnnnnnnnnnnnnnnnnnnnnnnnnnnnnnnnnnnnnnnnnnnnnnnnnnnnnnnnnnnnnnnnnnnnnnnnnnnnnnnnnnnnnnnnnnnnnnnnnnnnnnnnnnnnnnnnnnnnnnnnnnnnnnnnnnnnnnnnnnnnnnnnnnnnnnnnnnnnnnnnnnnnnnnnnnnnnnnnnnnnnnnnnnnnnnnnnnnnnnnnnnnnnnnnnnnnnnnnnnnnnnnnnnnnnnnnnnnnnnnnnnnnnnnnnnnnnnnnnnnnnnnnnnnnnnnnnnnnnnnnnnnnnnnnnnnnnnnnnnnnnnnnnnnnnnnnnnnnnnnnnnnnnnnnnnnnnnnnnnnnnnnnnnnnnnnnnnnnnnnnnnnnnnnnnnnnnnnnnnnnnnnnnnnnnnnnnnnnnnnnnnnnnnnnnnnnnnnnnnnnnnnnnnnnnnnnnnnnnnnnnnnnnnnnnnnnnnnnnnnnnnnnnnnnnnnnnnnnnnnnnnnnnnnnnnnnnnnnnnnnnnnnnnnnnnnnnnnnnnnnnnnnnnnnnnnnnnnnnnnnnnnnnnnnnnnnnnnnnnnnnnnnnnnnnnnnnnnnnnnnnnnnnnnnnnnnnnnnnnnnnnnnnnnnnnnnnnnnnnnnnnnnnnnnnnnnnnnnnnnnnnnnnnnnnnnnnnnnnnnnnnnnnnnnnnnnnnnnnnnnnnnnnnnnnnnnnnnnnnnnnnnnnnnnnnnnnnnnnnnnnnnnnnnnnnnnnnnnnnnnnnnnnnnnnnnnnnnnnnnnnnnnnnnnnnnnnnnnnnnnnnnnnnnnnnnnnnnnnnnnnnnnnnnnnnnnnnnnnnnnnnnnnnnnnnnnnnnnnnnnnnnnnnnnnnnnnnnnnnnnnnnnnnnnnnnnnnnnnnnnnnnnnnnnnnnnnnnnnnnnnnnnnnnnnnnnnnnnnnnnnnnnnnnnnnnnnnnnnnnnnnnnnnnnnnnnnnnnnnnnnnnnnnnnnnnnnnnnnnnnnnnnnnnnnnnnnnnnnnnnnnnnnnnnnnnnnnnnnnnnnnnnnnnnnnnnnnnnnnnnnnnnnnnnnnnnnnnnnnnnnnnnnnnnnnnnnnnnnnnnnnnnnnnnnnnnnnnnnnnnnnnnnnnnnnnnnnnnnnnnnnnnnnnnnnnnnnnnnnnnnnnnnnnnnnnnnnnnnnnnnnnnnnnnnnnnnnnnnnnnnnnnnnnnnnnnnnnnnnnnnnnnnnnnnnnnnnnnnnnnnnnnnnnnnnnnnnnnnnnnnnnnnnnnnnnnnnnnnnnnnnnnnnnnnnnnnnnnnnnnnnnnnnnnnnnnnnnnnnnnnnnnnnnnnnnnnnnnnnnnnnnnnnnnnnnnnnnnnnnnnnnnnnnnnnnnnnnnnnnnnnnnnnnnnnnnnnnnnnnnnnnnnnnnnnnnnnnnnnnnnnnnnnnnnnnnnnnnnnnnnnnnnnnnnnnnnnnnnnnnnnnnnnnnnnnnnnnnnnnnnnnnnnnnnnnnnnnnnnnnnnnnnnnnnnnnnnnnnnnnnnnnnnnnnnnnnnnnnnnnnnnnnnnnnnnnnnnnnnnnnnnnnnnnnnnnnnnnnnnnnnnnnnnnnnnnnnnnnnnnnnnnnnnnnnnnnnnnnnnnnnnnnnnnnnnnnnnnnnnnnnnnnnnnnnnnnnnnnnnnnnnnnnnnnnnnnnnnnnnnnnnnnnnnnnnnnnnnnnnnnnnnnnnnnnnnnnnnnnnnnnnnnnnnnnnnnnnnnnnnnnnnnnnnnnnnnnnnnnnnnnnnnnnnnnnnnnnnnnnnnnnnnnnnnnnnnnnnnnnnnnnnnnnnnnnnnnnnnnnnnnnnnnnnnnnnnnnnnnnnnnnnnnnnnnnnnnnnnnnnnnnnnnnnnnnnnnnnnnnnnnnnnnnnnnnnnnnnnnnnnnnnnnnnnnnnnnnnnnnnnnnnnnnnnnnnnnnnnnnnnnnnnnnnnnnnnnnnnnnnnnnnnnnnnnnnnnnnnnnnnnnnnnnnnnnnnnnnnnnnnnnnnnnnnnnnnnnnnnnnnnnnnnnnnnnnnnnnnnnnnnnnnnnnnnnnnnnnnnnnnnnnnnnnnnnnnnnnnnnnnnnnnnnnnnnnnnnnnnnnnnnnnnnnnnnnnnnnnnnnnnnnnnnnnnnnnnnnnnnnnnnnnnnnnnnnnnnnnnnnnnnnnnnnnnnnnnnnnnnnnnnnnnnnnnnnnnnnnnnnnnnnnnnnnnnnnnnnnnnnnnnnnnnnnnnnnnnnnnnnnnnnnnnnnnnnnnnnnnnnnnnnnnnnnnnnnnnnnnnnnnnnnnnnnnnnnnnnnnnnnnnnnnnnnnnnnnnnnnnnnnnnnnnnnnnnnnnnnnnnnnnnnnnnnnnnnnnnnnnnnnnnnnnnnnnnnnnnnnnnnnnnnnnnnnnnnnnnnnnnnnnnnnnnnnnnnnnnnnnnnnnnnnnnnnnnnnnnnnnnnnnnnnnnnnnnnnnnnnnnnnnnnnnnnnnnnnnnnnnnnnnnnnnnnnnnnnnnnnnnnnnnnnnnnnnnnnnnnnnnnnnnnnnnnnnnnnnnnnnnnnnnnnnnnnnnnnnnnnnnnnnnnnnnnnnnnnnnnnnnnnnnnnnnnnnnnnnnnnnnnnnnnnnnnnnnnnnnnnnnnnnnnnnnnnnnnnnnnnnnnnnnnnnnnnnnnnnnnnnnnnnnnnnnnnnnnnnnnnnnnnnnnnnnnnnnnnnnnnnnnnnnnnnnnnnnnnnnnnnnnnnnnnnnnnnnnnnnnnnnnnnnnnnnnnnnnnnnnnnnnnnnnnnnnnnnnnnnnnnnnnnnnnnnnnnnnnnnnnnnnnnnnnnnnnnnnnnnnnnnnnnnnnnnnnnnnnnnnnnnnnnnnnnnnnnnnnnnnnnnnnnnnnnnnnnnnnnnnnnnnnnnnnnnnnnnnnnnnnnnnnnnnnnnnnnnnnnnnnnnnnnnnnnnnnnnnnnnnnnnnnnnnnnnnnnnnnnnnnnnnnnnnnnnnnnnnnnnnnnnnnnnnnnnnnnnnnnnnnnnnnnnnnnnnnnnnnnnnnnnnnnnnnnnnnnnnnnnnnnnnnnnnnnnnnnnnnnnnnnnnnnnnnnnnnnnnnnnnnnnnnnnnnnnnnnnnnnnnnnnnnnnnnnnnnnnnnnnnnnnnnnnnnnnnnnnnnnnnnnnnnnnnnnnnnnnnnnnnnnnnnnnnnnnnnnnnnnnnnnnnnnnnnnnnnnnnnnnnnnnnnnnnnnnnnnnnnnnnnnnnnnnnnnnnnnnnnnnnnnnnnnnnnnnnnnnnnnnnnnnnnnnnnnnnnnnnnnnnnnnnnnnnnnnnnnnnnnnnnnnnnnnnnnnnnnnnnnnnnnnnnnnnnnnnnnnnnnnnnnnnnnnnnnnnnnnnnnnnnnnnnnnnnnnnnnnnnnnnnnnnnnnnnnnnnnnnnnnnnnnnnnnnnnnnnnnnnnnnnnnnnnnnnnnnnnnnnnnnnnnnnnnnnnnnnnnnnnnnnnnnnnnnnnnnnnnnnnnnnnnnnnnnnnnnnnnnnnnnnnnnnnnnnnnnnnnnnnnnnnnnnnnnnnnnnnnnnnnnnnnnnnnnnnnnnnnnnnnnnnnnnnnnnnnnnnnnnnnnnnnnnnnnnnnnnnnnnnnnnnnnnnnnnnnnnnnnnnnnnnnnnnnnnnnnnnnnnnnnnnnnnnnnnnnnnnnnnnnnnnnnnnnnnnnnnnnnnnnnnnnnnnnnnnnnnnnnnnnnnnnnnnnnnnnnnnnnnnnnnnnnnnnnnnnnnnnnnnnnnnnnnnnnnnnnnnnnnnnnnnnnnnnnnnnnnnnnnnnnnnnnnnnnnnnnnnnnnnnnnnnnnnnnnnnnnnnnnnnnnnnnnnnnnnnnnnnnnnnnnnnnnnnnnnnnnnnnnnnnnnnnnnnnnnnnnnnnnnnnnnnnnnnnnnnnnnnnnnnnnnnnnnnnnnnnnnnnnnnnnnnnnnnnnnnnnnnnnnnnnnnnnnnnnnnnnnnnnnnnnnnnnnnnnnnnnnnnnnnnnnnnnnnnnnnnnnnnnnnnnnnnnnnnnnnnnnnnnnnnnnnnnnnnnnnnnnnnnnnnnnnnnnnnnnnnnnnnnnnnnnnnnnnnnnnnnnnnnnnnnnnnnnnnnnnnnnnnnnnnnnnnnnnnnnnnnnnnnnnnnnnnnnnnnnnnnnnnnnnnnnnnnnnnnnnnnnnnnnnnnnnnnnnnnnnnnnnnnnnnnnnnnnnnnnnnnnnnnnnnnnnnnnnnnnnnnnnnnnnnnnnnnnnnnnnnnnnnnnnnnnnnnnnnnnnnnnnnnnnnnnnnnnnnnnnnnnnnnnnnnnnnnnnnnnnnnnnnnnnnnnnnnnnnnnnnnnnnnnnnnnnnnnnnnnnnnnnnnnnnnnnnnnnnnnnnnnnnnnnnnnnnnnnnnnnnnnnnnnnnnnnnnnnnnnnnnnnnnnnnnnnnnnnnnnnnnnnnnnnnnnnnnnnnnnnnnnnnnnnnnnnnnnnnnnnnnnnnnnnnnnnnnnnnnnnnnnnnnnnnnnnnnnnnnnnnnnnnnnnnnnnnnnnnnnnnnnnnnnnnnnnnnnnnnnnnnnnnnnnnnnnnnnnnnnnnnnnnnnnnnnnnnnnnnnnnnnnnnnnnnnnnnnnnnnnnnnnnnnnnnnnnnnnnnnnnnnnnnnnnnnnnnnnnnnnnnnnnnnnnnnnnnnnnnnnnnnnnnnnnnnnnnnnnnnnnnnnnnnnnnnnnnnnnnnnnnnnnnnnnnnnnnnnnnnnnnnnnnnnnnnnnnnnnnnnnnnnnnnnnnnnnnnnnnnnnnnnnnnnnnnnnnnnnnnnnnnnnnnnnnnnnnnnnnnnnnnnnnnnnnnnnnnnnnnnnnnnnnnnnnnnnnnnnnnnnnnnnnnnnnnnnnnnnnnnnnnnnnnnnnnnnnnnnnnnnnnnnnnnnnnnnnnnnnnnnnnnnnnnnnnnnnnnnnnnnnnnnnnnnnnnnnnnnnnnnnnnnnnnnnnnnnnnnnnnnnnnnnnnnnnnnnnnnnnnnnnnnnnnnnnnnnnnnnnnnnnnnnnnnnnnnnnnnnnnnnnnnnnnnnnnnnnnnnnnnnnnnnnnnnnnnnnnnnnnnnnnnnnnnnnnnnnnnnnnnnnnnnnnnnnnnnnnnnnnnnnnnnnnnnnnnnnnnnnnnnnnnnnnnnnnnnnnnnnnnnnnnnnnnnnnnnnnnnnnnnnnnnnnnnnnnnnnnnnnnnnnnnnnnnnnnnnnnnnnnnnnnnnnnnnnnnnnnnnnnnnnnnnnnnnnnnnnnnnnnnnnnnnnnnnnnnnnnnnnnnnnnnnnnnnnnnnnnnnnnnnnnnnnnnnnnnnnnnnnnnnnnnnnnnnnnnnnnnnnnnnnnnnnnnnnnnnnnnnnnnnnnnnnnnnnnnnnnnnnnnnnnnnnnnnnnnnnnnnnnnnnnnnnnnnnnnnnnnnnnnnnnnnnnnnnnnnnnnnnnnnnnnnnnnnnnnnnnnnnnnnnnnnnnnnnnnnnnnnnnnnnnnnnnnnnnnnnnnnnnnnnnnnnnnnnnnnnnnnnnnnnnnnnnnnnnnnnnnnnnnnnnnnnnnnnnnnnnnnnnnnnnnnnnnnnnnnnnnnnnnnnnnnnnnnnnnnnnnnnnnnnnnnnnnnnnnnnnnnnnnnnnnnnnnnnnnnnnnnnnnnnnnnnnnnnnnnnnnnnnnnnnnnnnnnnnnnnnnnnnnnnnnnnnnnnnnnnnnnnnnnnnnnnnnnnnnnnnnnnnnnnnnnnnnnnnnnnnnnnnnnnnnnnnnnnnnnnnnnnnnnnnnnnnnnnnnnnnnnnnnnnnnnnnnnnnnnnnnnnnnnnnnnnnnnnnnnnnnnnnnnnnnnnnnnnnnnnnnnnnnnnnnnnnnnnnnnnnnnnnnnnnnnnnnnnnnnnnnnnnnnnnnnnnnnnnnnnnnnnnnnnnnnnnnnnnnnnnnnnnnnnnnnnnnnnnnnnnnnnnnnnnnnnnnnnnnnnnnnnnnnnnnnnnnnnnnnnnnnnnnnnnnnnnnnnnnnnnnnnnnnnnnnnnnnnnnnnnnnnnnnnnnnnnnnnnnnnnnnnnnnnnnnnnnnnnnnnnnnnnnnnnnnnnnnnnnnnnnnnnnnnnnnnnnnnnnnnnnnnnnnnnnnnnnnnnnnnnnnnnnnnnnnnnnnnnnnnnnnnnnnnnnnnnnnnnnnnnnnnnnnnnnnnnnnnnnnnnnnnnnnnnnnnnnnnnnnnnnnnnnnnnnnnnnnnnnnnnnnnnnnnnnnnnnnnnnnnnnnnnnnnnnnnnnnnnnnnnnnnnnnnnnnnnnnnnnnnnnnnnnnnnnnnnnnnnnnnnnnnnnnnnnnnnnnnnnnnnnnnnnnnnnnnnnnnnnnnnnnnnnnnnnnnnnnnnnnnnnnnnnnnnnnnnnnnnnnnnnnnnnnnnnnnnnnnnnnnnnnnnnnnnnnnnnnnnnnnnnnnnnnnnnnnnnnnnnnnnnnnnnnnnnnnnnnnnnnnnnnnnnnnnnnnnnnnnnnnnnnnnnnnnnnnnnnnnnnnnnnnnnnnnnnnnnnnnnnnnnnnnnnnnnnnnnnnnnnnnnnnnnnnnnnnnnnnnnnnnnnnnnnnnnnnnnnnnnnnnnnnnnnnnnnnnnnnnnnnnnnnnnnnnnnnnnnnnnnnnnnnnnnnnnnnnnnnnnnnnnnnnnnnnnnnnnnnnnnnnnnnnnnnnnnnnnnnnnnnnnnnnnnnnnnnnnnnnnnnnnnnnnnnnnnnnnnnnnnnnnnnnnnnnnnnnnnnnnnnnnnnnnnnnnnnnnnnnnnnnnnnnnnnnnnnnnnnnnnnnnnnnnnnnnnnnnnnnnnnnnnnnnnnnnnnnnnnnnnnnnnnnnnnnnnnnnnnnnnnnnnnnnnnnnnnnnnnnnnnnnnnnnnnnnnnnnnnnnnnnnnnnnnnnnnnnnnnnnnnnnnnnnnnnnnnnnnnnnnnnnnnnnnnnnnnnnnnnnnnnnnnnnnnnnnnnnnnnnnnnnnnnnnnnnnnnnnnnnnnnnnnnnnnnnnnnnnnnnnnnnnnnnnnnnnnnnnnnnnnnnnnnnnnnnnnnnnnnnnnnnnnnnnnnnnnnnnnnnnnnnnnnnnnnnnnnnnnnnnnnnnnnnnnnnnnnnnnnnnnnnnnnnnnnnnnnnnnnnnnnnnnnnnnnnnnnnnnnnnnnnnnnnnnnnnnnnnnnnnnnnnnnnnnnnnnnnnnnnnnnnnnnnnnnnnnnnnnnnnnnnnnnnnnnnnnnnnnnnnnnnnnnnnnnnnnnnnnnnnnnnnnnnnnnnnnnnnnnnnnnnnnnnnnnnnnnnnnnnnnnnnnnnnnnnnnnnnnnnnnnnnnnnnnnnnnnnnnnnnnnnnnnnnnnnnnnnnnnnnnnnnnnnnnnnnnnnnnnnnnnnnnnnnnnnnnnnnnnnnnnnnnnnnnnnnnnnnnnnnnnnnnnnnnnnnnnnnnnnnnnnnnnnnnnnnnnnnnnnnnnnnnnnnnnnnnnnnnnnnnnnnnnnnnnnnnnnnnnnnnnnnnnnnnnnnnnnnnnnnnnnnnnnnnnnnnnnnnnnnnnnnnnnnnnnnnnnnnnnnnnnnnnnnnnnnnnnnnnnnnnnnnnnnnnnnnnnnnnnnnnnnnnnnnnnnnnnnnnnnnnnnnnnnnnnnnnnnnnnnnnnnnnnnnnnnnnnnnnnnnnnnnnnnnnnnnnnnnnnnnnnnnnnnnnnnnnnnnnnnnnnnnnnnnnnnnnnnnnnnnnnnnnnnnnnnnnnnnnnnnnnnnnnnnnnnnnnnnnnnnnnnnnnnnnnnnnnnnnnnnnnnnnnnnnnnnnnnnnnnnnnnnnnnnnnnnnnnnnnnnnnnnnnnnnnnnnnnnnnnnnnnnnnnnnnnnnnnnnnnnnnnnnnnnnnnnnnnnnnnnnnnnnnnnnnnnnnnnnnnnnnnnnnnnnnnnnnnnnnnnnnnnnnnnnnnnnnnnnnnnnnnnnnnnnnnnnnnnnnnnnnnnnnnnnnnnnnnnnnnnnnnnnnnnnnnnnnnnnnnnnnnnnnnnnnnnnnnnnnnnnnnnnnnnnnnnnnnnnnnnnnnnnnnnnnnnnnnnnnnnnnnnnnnnnnnnnnnnnnnnnnnnnnnnnnnnnnnnnnnnnnnnnnnnnnnnnnnnnnnnnnnnnnnnnnnnnnnnnnnnnnnnnnnnnnnnnnnnnnnnnnnnnnnnnnnnnnnnnnnnnnnnnnnnnnnnnnnnnnnnnnnnnnnnnnnnnnnnnnnnnnnnnnnnnnnnnnnnnnnnnnnnnnnnnnnnnnnnnnnnnnnnnnnnnnnnnnnnnnnnnnnnnnnnnnnnnnnnnnnnnnnnnnnnnnnnnnnnnnnnnnnnnnnnnnnnnnnnnnnnnnnnnnnnnnnnnnnnnnnnnnnnnnnnnnnnnnnnnnnnnnnnnnnnnnnnnnnnnnnnnnnnnnnnnnnnnnnnnnnnnnnnnnnnnnnnnnnnnnnnnnnnnnnnnnnnnnnnnnnnnnnnnnnnnnnnnnnnnnnnnnnnnnnnnnnnnnnnnnnnnnnnnnnnnnnnnnnnnnnnnnnnnnnnnnnnnnnnnnnnnnnnnnnnnnnnnnnnnnnnnnnnnnnnnnnnnnnnnnnnnnnnnnnnnnnnnnnnnnnnnnnnnnnnnnnnnnnnnnnnnnnnnnnnnnnnnnnnnnnnnnnnnnnnnnnnnnnnnnnnnnnnnnnnnnnnnnnnnnnnnnnnnnnnnnnnnnnnnnnnnnnnnnnnnnnnnnnnnnnnnnnnnnnnnnnnnnnnnnnnnnnnnnnnnnnnnnnnnnnnnnnnnnnnnnnnnnnnnnnnnnnnnnnnnnnnnnnnnnnnnnnnnnnnnnnnnnnnnnnnnnnnnnnnnnnnnnnnnnnnnnnnnnnnnnnnnnnnnnnnnnnnnnnnnnnnnnnnnnnnnnnnnnnnnnnnnnnnnnnnnnnnnnnnnnnnnnnnnnnnnnnnnnnnnnnnnnnnnnnnnnnnnnnnnnnnnnnnnnnnnnnnnnnnnnnnnnnnnnnnnnnnnnnnnnnnnnnnnnnnnnnnnnnnnnnnnnnnnnnnnnnnnnnnnnnnnnnnnnnnnnnnnnnnnnnnnnnnnnnnnnnnnnnnnnnnnnnnnnnnnnnnnnnnnnnnnnnnnnnnnnnnnnnnnnnnnnnnnnnnnnnnnnnnnnnnnnnnnnnnnnnnnnnnnnnnnnnnnnnnnnnnnnnnnnnnnnnnnnnnnnnnnnnnnnnnnnnnnnnnnnnnnnnnnnnnnnnnnnnnnnnnnnnnnnnnnnnnnnnnnnnnnnnnnnnnnnnnnnnnnnnnnnnnnnnnnnnnnnnnnnnnnnnnnnnnnnnnnnnnnnnnnnnnnnnnnnnnnnnnnnnnnnnnnnnnnnnnnnnnnnnnnnnnnnnnnnnnnnnnnnnnnnnnnnnnnnnnnnnnnnnnnnnnnnnnnnnnnnnnnnnnnnnnnnnnnnnnnnnnnnnnnnnnnnnnnnnnnnnnnnnnnnnnnnnnnnnnnnnnnnnnnnnnnnnnnnnnnnnnnnnnnnnnnnnnnnnnnnnnnnnnnnnnnnnnnnnnnnnnnnnnnnnnnnnnnnnnnnnnnnnnnnnnnnnnnnnnnnnnnnnnnnnnnnnnnnnnnnnnnnnnnnnnnnnnnnnnnnnnnnnnnnnnnnnnnnnnnnnnnnnnnnnnnnnnnnnnnnnnnnnnnnnnnnnnnnnnnnnnnnnnnnnnnnnnnnnnnnnnnnnnnnnnnnnnnnnnnnnnnnnnnnnnnnnnnnnnnnnnnnnnnnnnnnnnnnnnnnnnnnnnnnnnnnnnnnnnnnnnnnnnnnnnnnnnnnnnnnnnnnnnnnnnnnnnnnnnnnnnnnnnnnnnnnnnnnnnnnnnnnnnnnnnnnnnnnnnnnnnnnnnnnnnnnnnnnnnnnnnnnnnnnnnnnnnnnnnnnnnnnnnnnnnnnnnnnnnnnnnnnnnnnnnnnnnnnnnnnnnnnnnnnnnnnnnnnnnnnnnnnnnnnnnnnnnnnnnnnnnnnnnnnnnnnnnnnnnnnnnnnnnnnnnnnnnnnnnnnnnnnnnnnnnnnnnnnnnnnnnnnnnnnnnnnnnnnnnnnnnnnnnnnnnnnnnnnnnnnnnnnnnnnnnnnnnnnnnnnnnnnnnnnnnnnnnnnnnnnnnnnnnnnnnnnnnnnnnnnnnnnnnnnnnnnnnnnnnnnnnnnnnnnnnnnnnnnnnnnnnnnnnnnnnnnnnnnnnnnnnnnnnnnnnnnnnnnnnnnnnnnnnnnnnnnnnnnnnnnnnnnnnnnnnnnnnnnnnnnnnnnnnnnnnnnnnnnnnnnnnnnnnnnnnnnnnnnnnnnnnnnnnnnnnnnnnnnnnnnnnnnnnnnnnnnnnnnnnnnnnnnnnnnnnnnnnnnnnnnnnnnnnnnnnnnnnnnnnnnnnnnnnnnnnnnnnnnnnnnnnnnnnnnnnnnnnnnnnnnnnnnnnnnnnnnnnnnnnnnnnnnnnnnnnnnnnnnnnnnnnnnnnnnnnnnnnnnnnnnnnnnnnnnnnnnnnnnnnnnnnnnnnnnnnnnnnnnnnnnnnnnnnnnnnnnnnnnnnnnnnnnnnnnnnnnnnnnnnnnnnnnnnnnnnnnnnnnnnnnnnnnnnnnnnnnnnnnnnnnnnnnnnnnnnnnnnnnnnnnnnnnnnnnnnnnnnnnnnnnnnnnnnnnnnnnnnnnnnnnnnnnnnnnnnnnnnnnnnnnnnnnnnnnnnnnnnnnnnnnnnnnnnnnnnnnnnnnnnnnnnnnnnnnnnnnnnnnnnnnnnnnnnnnnnnnnnnnnnnnnnnnnnnnnnnnnnnnnnnnnnnnnnnnnnnnnnnnnnnnnnnnnnnnnnnnnnnnnnnnnnnnnnnnnnnnnnnnnnnnnnnnnnnnnnnnnnnnnnnnnnnnnnnnnnnnnnnnnnnnnnnnnnnnnnnnnnnnnnnnnnnnnnnnnnnnnnnnnnnnnnnnnnnnnnnnnnnnnnnnnnnnnnnnnnnnnnnnnnnnnnnnnnnnnnnnnnnnnnnnnnnnnnnnnnnnnnnnnnnnnnnnnnnnnnnnnnnnnnnnnnnnnnnnnnnnnnnnnnnnnnnnnnnnnnnnnnnnnnnnnnnnnnnnnnnnnnnnnnnnnnnnnnnnnnnnnnnnnnnnnnnnnnnnnnnnnnnnnnnnnnnnnnnnnnnnnnnnnnnnnnnnnnnnnnnnnnnnnnnnnnnnnnnnnnnnnnnnnnnnnnnnnnnnnnnnnnnnnnnnnnnnnnnnnnnnnnnnnnnnnnnnnnnnnnnnnnnnnnnnnnnnnnnnnnnnnnnnnnnnnnnnnnnnnnnnnnnnnnnnnnnnnnnnnnnnnnnnnnnnnnnnnnnnnnnnnnnnnnnnnnnnnnnnnnnnnnnnnnnnnnnnnnnnnnnnnnnnnnnnnnnnnnnnnnnnnnnnnnnnnnnnnnnnnnnnnnnnnnnnnnnnnnnnnnnnnnnnnnnnnnnnnnnnnnnnnnnnnnnnnnnnnnnnnnnnnnnnnnnnnnnnnnnnnnnnnnnnnnnnnnnnnnnnnnnnnnnnnnnnnnnnnnnnnnnnnnnnnnnnnnnnnnnnnnnnnnnnnnnnnnnnnnnnnnnnnnnnnnnnnnnnnnnnnnnnnnnnnnnnnnnnnnnnnnnnnnnnnnnnnnnnnnnnnnnnnnnnnnnnnnnnnnnnnnnnnnnnnnnnnnnnnnnnnnnnnnnnnnnnnnnnnnnnnnnnnnnnnnnnnnnnnnnnnnnnnnnnnnnnnnnnnnnnnnnnnnnnnnnnnnnnnnnnnnnnnnnnnnnnnnnnnnnnnnnnnnnnnnnnnnnnnnnnnnnnnnnnnnnnnnnnnnnnnnnnnnnnnnnnnnnnnnnnnnnnnnnnnnnnnnnnnnnnnnnnnnnnnnnnnnnnnnnnnnnnnnnnnnnnnnnnnnnnnnnnnnnnnnnnnnnnnnnnnnnnnnnnnnnnnnnnnnnnnnnnnnnnnnnnnnnnnnnnnnnnnnnnnnnnnnnnnnnnnnnnnnnnnnnnnnnnnnnnnnnnnnnnnnnnnnnnnnnnnnnnnnnnnnnnnnnnnnnnnnnnnnnnnnnnnnnnnnnnnnnnnnnnnnnnnnnnnnnnnnnnnnnnnnnnnnnnnnnnnnnnnnnnnnnnnnnnnnnnnnnnnnnnnnnnnnnnnnnnnnnnnnnnnnnnnnnnnnnnnnnnnnnnnnnnnnnnnnnnnnnnnnnnnnnnnnnnnnnnnnnnnnnnnnnnnnnnnnnnnnnnnnnnnnnnnnnnnnnnnnnnnnnnnnnnnnnnnnnnnnnnnnnnnnnnnnnnnnnnnnnnnnnnnnnnnnnnnnnnnnnnnnnnnnnnnnnnnnnnnnnnnnnnnnnnnnnnnnnnnnnnnnnnnnnnnnnnnnnnnnnnnnnnnnnnnnnnnnnnnnnnnnnnnnnnnnnnnnnnnnnnnnnnnnnnnnnnnnnnnnnnnnnnnnnnnnnnnnnnnnnnnnnnnnnnnnnnnnnnnnnnnnnnnnnnnnnnnnnnnnnnnnnnnnnnnnnnnnnnnnnnnnnnnnnnnnnnnnnnnnnnnnnnnnnnnnnnnnnnnnnnnnnnnnnnnnnnnnnnnnnnnnnnnnnnnnnnnnnnnnnnnnnnnnnnnnnnnnnnnnnnnnnnnnnnnnnnnnnnnnnnnnnnnnnnnnnnnnnnnnnnnnnnnnnnnnnnnnnnnnnnnnnnnnnnnnnnnnnnnnnnnnnnnnnnnnnnnnnnnnnnnnnnnnnnnnnnnnnnnnnnnnnnnnnnnnnnnnnnnnnnnnnnnnnnnnnnnnnnnnnnnnnnnnnnnnnnnnnnnnnnnnnnnnnnnnnnnnnnnnnnnnnnnnnnnnnnnnnnnnnnnnnnnnnnnnnnnnnnnnnnnnnnnnnnnnnnnnnnnnnnnnnnnnnnnnnnnnnnnnnnnnnnnnnnnnnnnnnnnnnnnnnnnnnnnnnnnnnnnnnnnnnnnnnnnnnnnnnnnnnnnnnnnnnnnnnnnnnnnnnnnnnnnnnnnnnnnnnnnnnnnnnnnnnnnnnnnnnnnnnnnnnnnnnnnnnnnnnnnnnnnnnnnnnnnnnnnnnnnnnnnnnnnnnnnnnnnnnnnnnnnnnnnnnnnnnnnnnnnnnnnnnnnnnnnnnnnnnnnnnnnnnnnnnnnnnnnnnnnnnnnnnnnnnnnnnnnnnnnnnnnnnnnnnnnnnnnnnnnnnnnnnnnnnnnnnnnnnnnnnnnnnnnnnnnnnnnnnnnnnnnnnnnnnnnnnnnnnnnnnnnnnnnnnnnnnnnnnnnnnnnnnnnnnnnnnnnnnnnnnnnnnnnnnnnnnnnnnnnnnnnnnnnnnnnnnnnnnnnnnnnnnnnnnnnnnnnnnnnnnnnnnnnnnnnnnnnnnnnnnnnnnnnnnnnnnnnnnnnnnnnnnnnnnnnnnnnnnnnnnnnnnnnnnnnnnnnnnnnnnnnnnnnnnnnnnnnnnnnnnnnnnnnnnnnnnnnnnnnnnnnnnnnnnnnnnnnnnnnnnnnnnnnnnnnnnnnnnnnnnnnnnnnnnnnnnnnnnnnnnnnnnnnnnnnnnnnnnnnnnnnnnnnnnnnnnnnnnnnnnnnnnnnnnnnnnnnnnnnnnnnnnnnnnnnnnnnnnnnnnnnnnnnnnnnnnnnnnnnnnnnnnnnnnnnnnnnnnnnnnnnnnnnnnnnnnnnnnnnnnnnnnnnnnnnnnnnnnnnnnnnnnnnnnnnnnnnnnnnnnnnnnnnnnnnnnnnnnnnnnnnnnnnnnnnnnnnnnnnnnnnnnnnnnnnnnnnnnnnnnnnnnnnnnnnnnnnnnnnnnnnnnnnnnnnnnnnnnnnnnnnnnnnnnnnnnnnnnnnnnnnnnnnnnnnnnnnnnnnnnnnnnnnnnnnnnnnnnnnnnnnnnnnnnnnnnnnnnnnnnnnnnnnnnnnnnnnnnnnnnnnnnnnnnnnnnnnnnnnnnnnnnnnnnnnnnnnnnnnnnnnnnnnnnnnnnnnnnnnnnnnnnnnnnnnnnnnnnnnnnnnnnnnnnnnnnnnnnnnnnnnnnnnnnnnnnnnnnnnnnnnnnnnnnnnnnnnnnnnnnnnnnnnnnnnnnnnnnnnnnnnnnnnnnnnnnnnnnnnnnnnnnnnnnnnnnnnnnnnnnnnnnnnnnnnnnnnnnnnnnnnnnnnnnnnnnnnnnnnnnnnnnnnnnnnnnnnnnnnnnnnnnnnnnnnnnnnnnnnnnnnnnnnnnnnnnnnnnnnnnnnnnnnnnnnnnnnnnnnnnnnnnnnnnnnnnnnnnnnnnnnnnnnnnnnnnnnnnnnnnnnnnnnnnnnnnnnnnnnnnnnnnnnnnnnnnnnnnnnnnnnnnnnnnnnnnnnnnnnnnnnnnnnnnnnnnnnnnnnnnnnnnnnnnnnnnnnnnnnnnnnnnnnnnnnnnnnnnnnnnnnnnnnnnnnnnnnnnnnnnnnnnnnnnnnnnnnnnnnnnnnnnnnnnnnnnnnnnnnnnnnnnnnnnnnnnnnnnnnnnnnnnnnnnnnnnnnnnnnnnnnnnnnnnnnnnnnnnnnnnnnnnnnnnnnnnnnnnnnnnnnnnnnnnnnnnnnnnnnnnnnnnnnnnnnnnnnnnnnnnnnnnnnnnnnnnnnnnnnnnnnnnnnnnnnnnnnnnnnnnnnnnnnnnnnnnnnnnnnnnnnnnnnnnnnnnnnnnnnnnnnnnnnnnnnnnnnnnnnnnnnnnnnnnnnnnnnnnnnnnnnnnnnnnnnnnnnnnnnnnnnnnnnnnnnnnnnnnnnnnnnnnnnnnnnnnnnnnnnnnnnnnnnnnnnnnnnnnnnnnnnnnnnnnnnnnnnnnnnnnnnnnnnnnnnnnnnnnnnnnnnnnnnnnnnnnnnnnnnnnnnnnnnnnnnnnnnnnnnnnnnnnnnnnnnnnnnnnnnnnnnnnnnnnnnnnnnnnnnnnnnnnnnnnnnnnnnnnnnnnnnnnnnnnnnnnnnnnnnnnnnnnnnnnnnnnnnnnnnnnnnnnnnnnnnnnnnnnnnnnnnnnnnnnnnnnnnnnnnnnnnnnnnnnnnnnnnnnnnnnnnnnnnnnnnnnnnnnnnnnnnnnnnnnnnnnnnnnnnnnnnnnnnnnnnnnnnnnnnnnnnnnnnnnnnnnnnnnnnnnnnnnnnnnnnnnnnnnnnnnnnnnnnnnnnnnnnnnnnnnnnnnnnnnnnnnnnnnnnnnnnnnnnnnnnnnnnnnnnnnnnnnnnnnnnnnnnnnnnnnnnnnnnnnnnnnnnnnnnnnnnnnnnnnnnnnnnnnnnnnnnnnnnnnnnnnnnnnnnnnnnnnnnnnnnnnnnnnnnnnnnnnnnnnnnnnnnnnnnnnnnnnnnnnnnnnnnnnnnnnnnnnnnnnnnnnnnnnnnnnnnnnnnnnnnnnnnnnnnnnnnnnnnnnnnnnnnnnnnnnnnnnnnnnnnnnnnnnnnnnnnnnnnnnnnnnnnnnnnnnnnnnnnnnnnnnnnnnnnnnnnnnnnnnnnnnnnnnnnnnnnnnnnnnnnnnnnnnnnnnnnnnnnnnnnnnnnnnnnnnnnnnnnnnnnnnnnnnnnnnnnnnnnnnnnnnnnnnnnnnnnnnnnnnnnnnnnnnnnnnnnnnnnnnnnnnnnnnnnnnnnnnnnnnnnnnnnnnnnnnnnnnnnnnnnnnnnnnnnnnnnnnnnnnnnnnnnnnnnnnnnnnnnnnnnnnnnnnnnnnnnnnnnnnnnnnnnnnnnnnnnnnnnnnnnnnnnnnnnnnnnnnnnnnnnnnnnnnnnnnnnnnnnnnnnnnnnnnnnnnnnnnnnnnnnnnnnnnnnnnnnnnnnnnnnnnnnnnnnnnnnnnnnnnnnnnnnnnnnnnnnnnnnnnnnnnnnnnnnnnnnnnnnnnnnnnnnnnnnnnnnnnnnnnnnnnnnnnnnnnnnnnnnnnnnnnnnnnnnnnnnnnnnnnnnnnnnnnnnnnnnnnnnnnnnnnnnnnnnnnnnnnnnnnnnnnnnnnnnnnnnnnnnnnnnnnnnnnnnnnnnnnnnnnnnnnnnnnnnnnnnnnnnnnnnnnnnnnnnnnnnnnnnnnnnnnnnnnnnnnnnnnnnnnnnnnnnnnnnnnnnnnnnnnnnnnnnnnnnnnnnnnnnnnnnnnnnnnnnnnnnnnnnnnnnnnnnnnnnnnnnnnnnnnnnnnnnnnnnnnnnnnnnnnnnnnnnnnnnnnnnnnnnnnnnnnnnnnnnnnnnnnnnnnnnnnnnnnnnnnnnnnnnnnnnnnnnnnnnnnnnnnnnnnnnnnnnnnnnnnnnnnnnnnnnnnnnnnnnnnnnnnnnnnnnnnnnnnnnnnnnnnnnnnnnnnnnnnnnnnnnnnnnnnnnnnnnnnnnnnnnnnnnnnnnnnnnnnnnnnnnnnnnnnnnnnnnnnnnnnnnnnnnnnnnnnnnnnnnnnnnnnnnnnnnnnnnnnnnnnnnnnnnnnnnnnnnnnnnnnnnnnnnnnnnnnnnnnnnnnnnnnnnnnnnnnnnnnnnnnnnnnnnnnnnnnnnnnnnnnnnnnnnnnnnnnnnnnnnnnnnnnnnnnnnnnnnnnnnnnnnnnnnnnnnnnnnnnnnnnnnnnnnnnnnnnnnnnnnnnnnnnnnnnnnnnnnnnnnnnnnnnnnnnnnnnnnnnnnnnnnnnnnnnnnnnnnnnnnnnnnnnnnnnnnnnnnnnnnnnnnnnnnnnnnnnnnnnnnnnnnnnnnnnnnnnnnnnnnnnnnnnnnnnnnnnnnnnnnnnnnnnnnnnnnnnnnnnnnnnnnnnnnnnnnnnnnnnnnnnnnnnnnnnnnnnnnnnnnnnnnnnnnnnnnnnnnnnnnnnnnnnnnnnnnnnnnnnnnnnnnnnnnnnnnnnnnnnnnnnnnnnnnnnnnnnnnnnnnnnnnnnnnnnnnnnnnnnnnnnnnnnnnnnnnnnnnnnnnnnnnnnnnnnnnnnnnnnnnnnnnnnnnnnnnnnnnnnnnnnnnnnnnnnnnnnnnnnnnnnnnnnnnnnnnnnnnnnnnnnnnnnnnnnnnnnnnnnnnnnnnnnnnnnnnnnnnnnnnnnnnnnnnnnnnnnnnnnnnnnnnnnnnnnnnnnnnnnnnnnnnnnnnnnnnnnnnnnnnnnnnnnnnnnnnnnnnnnnnnnnnnnnnnnnnnnnnnnnnnnnnnnnnnnnnnnnnnnnnnnnnnnnnnnnnnnnnnnnnnnnnnnnnnnnnnnnnnnnnnnnnnnnnnnnnnnnnnnnnnnnnnnnnnnnnnnnnnnnnnnnnnnnnnnnnnnnnnnnnnnnnnnnnnnnnnnnnnnnnnnnnnnnnnnnnnnnnnnnnnnnnnnnnnnnnnnnnnnnnnnnnnnnnnnnnnnnnnnnnnnnnnnnnnnnnnnnnnnnnnnnnnnnnnnnnnnnnnnnnnnnnnnnnnnnnnnnnnnnnnnnnnnnnnnnnnnnnnnnnnnnnnnnnnnnnnnnnnnnnnnnnnnnnnnnnnnnnnnnnnnnnnnnnnnnnnnnnnnnnnnnnnnnnnnnnnnnnnnnnnnnnnnnnnnnnnnnnnnnnnnnnnnnnnnnnnnnnnnnnnnnnnnnnnnnnnnnnnnnnnnnnnnnnnnnnnnnnnnnnnnnnnnnnnnnnnnnnnnnnnnnnnnnnnnnnnnnnnnnnnnnnnnnnnnnnnnnnnnnnnnnnnnnnnnnnnnnnnnnnnnnnnnnnnnnnnnnnnnnnnnnnnnnnnnnnnnnnnnnnnnnnnnnnnnnnnnnnnnnnnnnnnnnnnnnnnnnnnnnnnnnnnnnnnnnnnnnnnnnnnnnnnnnnnnnnnnnnnnnnnnnnnnnnnnnnnnnnnnnnnnnnnnnnnnnnnnnnnnnnnnnnnnnnnnnnnnnnnnnnnnnnnnnnnnnnnnnnnnnnnnnnnnnnnnnnnnnnnnnnnnnnnnnnnnnnnnnnnnnnnnnnnnnnnnnnnnnnnnnnnnnnnnnnnnnnnnnnnnnnnnnnnnnnnnnnnnnnnnnnnnnnnnnnnnnnnnnnnnnnnnnnnnnnnnnnnnnnnnnnnnnnnnnnnnnnnnnnnnnnnnnnnnnnnnnnnnnnnnnnnnnnnnnnnnnnnnnnnnnnnnnnnnnnnnnnnnnnnnnnnnnnnnnnnnnnnnnnnnnnnnnnnnnnnnnnnnnnnnnnnnnnnnnnnnnnnnnnnnnnnnnnnnnnnnnnnnnnnnnnnnnnnnnnnnnnnnnnnnnnnnnnnnnnnnnnnnnnnnnnnnnnnnnnnnnnnnnnnnnnnnnnnnnnnnnnnnnnnnnnnnnnnnnnnnnnnnnnnnnnnnnnnnnnnnnnnnnnnnnnnnnnnnnnnnnnnnnnnnnnnnnnnnnnnnnnnnnnnnnnnnnnnnnnnnnnnnnnnnnnnnnnnnnnnnnnnnnnnnnnnnnnnnnnnnnnnnnnnnnnnnnnnnnnnnnnnnnnnnnnnnnnnnnnnnnnnnnnnnnnnnnnnnnnnnnnnnnnnnnnnnnnnnnnnnnnnnnnnnnnnnnnnnnnnnnnnnnnnnnnnnnnnnnnnnnnnnnnnnnnnnnnnnnnnnnnnnnnnnnnnnnnnnnnnnnnnnnnnnnnnnnnnnnnnnnnnnnnnnnnnnnnnnnnnnnnnnnnnnnnnnnnnnnnnnnnnnnnnnnnnnnnnnnnnnnnnnnnnnnnnnnnnnnnnnnnnnnnnnnnnnnnnnnnnnnnnnnnnnnnnnnnnnnnnnnnnnnnnnnnnnnnnnnnnnnnnnnnnnnnnnnnnnnnnnnnnnnnnnnnnnnnnnnnnnnnnnnnnnnnnnnnnnnnnnnnnnnnnnnnnnnnnnnnnnnnnnnnnnnnnnnnnnnnnnnnnnnnnnnnnnnnnnnnnnnnnnnnnnnnnnnnnnnnnnnnnnnnnnnnnnnnnnnnnnnnnnnnnnnnnnnnnnnnnnnnnnnnnnnnnnnnnnnnnnnnnnnnnnnnnnnnnnnnnnnnnnnnnnnnnnnnnnnnnnnnnnnnnnnnnnnnnnnnnnnnnnnnnnnnnnnnnnnnnnnnnnnnnnnnnnnnnnnnnnnnnnnnnnnnnnnnnnnnnnnnnnnnnnnnnnnnnnnnnnnnnnnnnnnnnnnnnnnnnnnnnnnnnnnnnnnnnnnnnnnnnnnnnnnnnnnnnnnnnnnnnnnnnnnnnnnnnnnnnnnnnnnnnnnnnnnnnnnnnnnnnnnnnnnnnnnnnnnnnnnnnnnnnnnnnnnnnnnnnnnnnnnnnnnnnnnnnnnnnnnnnnnnnnnnnnnnnnnnnnnnnnnnnnnnnnnnnnnnnnnnnnnnnnnnnnnnnnnnnnnnnnnnnnnnnnnnnnnnnnnnnnnnnnnnnnnnnnnnnnnnnnnnnnnnnnnnnnnnnnnnnnnnnnnnnnnnnnnnnnnnnnnnnnnnnnnnnnnnnnnnnnnnnnnnnnnnnnnnnnnnnnnnnnnnnnnnnnnnnnnnnnnnnnnnnnnnnnnnnnnnnnnnnnnnnnnnnnnnnnnnnnnnnnnnnnnnnnnnnnnnnnnnnnnnnnnnnnnnnnnnnnnnnnnnnnnnnnnnnnnnnnnnnnnnnnnnnnnnnnnnnnnnnnnnnnnnnnnnnnnnnnnnnnnnnnnnnnnnnnnnnnnnnnnnnnnnnnnnnnnnnnnnnnnnnnnnnnnnnnnnnnnnnnnnnnnnnnnnnnnnnnnnnnnnnnnnnnnnnnnnnnnnnnnnnnnnnnnnnnnnnnnnnnnnnnnnnnnnnnnnnnnnnnnnnnnnnnnnnnnnnnnnnnnnnnnnnnnnnnnnnnnnnnnnnnnnnnnnnnnnnnnnnnnnnnnnnnnnnnnnnnnnnnnnnnnnnnnnnnnnnnnnnnnnnnnnnnnnnnnnnnnnnnnnnnnnnnnnnnnnnnnnnnnnnnnnnnnnnnnnnnnnnnnnnnnnnnnnnnnnnnnnnnnnnnnnnnnnnnnnnnnnnnnnnnnnnnnnnnnnnnnnnnnnnnnnnnnnnnnnnnnnnnnnnnnnnnnnnnnnnnnnnnnnnnnnnnnnnnnnnnnnnnnnnnnnnnnnnnnnnnnnnnnnnnnnnnnnnnnnnnnnnnnnnnnnnnnnnnnnnnnnnnnnnnnnnnnnnnnnnnnnnnnnnnnnnnnnnnnnnnnnnnnnnnnnnnnnnnnnnnnnnnnnnnnnnnnnnnnnnnnnnnnnnnnnnnnnnnnnnnnnnnnnnnnnnnnnnnnnnnnnnnnnnnnnnnnnnnnnnnnnnnnnnnnnnnnnnnnnnnnnnnnnnnnnnnnnnnnnnnnnnnnnnnnnnnnnnnnnnnnnnnnnnnnnnnnnnnnnnnnnnnnnnnnnnnnnnnnnnnnnnnnnnnnnnnnnnnnnnnnnnnnnnnnnnnnnnnnnnnnnnnnnnnnnnnnnnnnnnnnnnnnnnnnnnnnnnnnnnnnnnnnnnnnnnnnnnnnnnnnnnnnnnnnnnnnnnnnnnnnnnnnnnnnnnnnnnnnnnnnnnnnnnnnnnnnnnnnnnnnnnnnnnnnnnnnnnnnnnnnnnnnnnnnnnnnnnnnnnnnnnnnnnnnnnnnnnnnnnnnnnnnnnnnnnnnnnnnnnnnnnnnnnnnnnnnnnnnnnnnnnnnnnnnnnnnnnnnnnnnnnnnnnnnnnnnnnnnnnnnnnnnnnnnnnnnnnnnnnnnnnnnnnnnnnnnnnnnnnnnnnnnnnnnnnnnnnnnnnnnnnnnnnnnnnnnnnnnnnnnnnnnnnnnnnnnnnnnnnnnnnnnnnnnnnnnnnnnnnnnnnnnnnnnnnnnnnnnnnnnnnnnnnnnnnnnnnnnnnnnnnnnnnnnnnnnnnnnnnnnnnnnnnnnnnnnnnnnnnnnnnnnnnnnnnnnnnnnnnnnnnnnnnnnnnnnnnnnnnnnnnnnnnnnnnnnnnnnnnnnnnnnnnnnnnnnnnnnnnnnnnnnnnnnnnnnnnnnnnnnnnnnnnnnnnnnnnnnnnnnnnnnnnnnnnnnnnnnnnnnnnnnnnnnnnnnnnnnnnnnnnnnnnnnnnnnnnnnnnnnnnnnnnnnnnnnnnnnnnnnnnnnnnnnnnnnnnnnnnnnnnnnnnnnnnnnnnnnnnnnnnnnnnnnnnnnnnnnnnnnnnnnnnnnnnnnnnnnnnnnnnnnnnnnnnnnnnnnnnnnnnnnnnnnnnnnnnnnnnnnnnnnnnnnnnnnnnnnnnnnnnnnnnnnnnnnnnnnnnnnnnnnnnnnnnnnnnnnnnnnnnnnnnnnnnnnnnnnnnnnnnnnnnnnnnnnnnnnnnnnnnnnnnnnnnnnnnnnnnnnnnnnnnnnnnnnnnnnnnnnnnnnnnnnnnnnnnnnnnnnnnnnnnnnnnnnnnnnnnnnnnnnnnnnnnnnnnnnnnnnnnnnnnnnnnnnnnnnnnnnnnnnnnnnnnnnnnnnnnnnnnnnnnnnnnnnnnnnnnnnnnnnnnnnnnnnnnnnnnnnnnnnnnnnnnnnnnnnnnnnnnnnnnnnnnnnnnnnnnnnnnnnnnnnnnnnnnnnnnnnnnnnnnnnnnnnnnnnnnnnnnnnnnnnnnnnnnnnnnnnnnnnnnnnnnnnnnnnnnnnnnnnnnnnnnnnnnnnnnnnnnnnnnnnnnnnnnnnnnnnnnnnnnnnnnnnnnnnnnnnnnnnnnnnnnnnnnnnnnnnnnnnnnnnnnnnnnnnnnnnnnnnnnnnnnnnnnnnnnnnnnnnnnnnnnnnnnnnnnnnnnnnnnnnnnnnnnnnnnnnnnnnnnnnnnnnnnnnnnnnnnnnnnnnnnnnnnnnnnnnnnnnnnnnnnnnnnnnnnnnnnnnnnnnnnnnnnnnnnnnnnnnnnnnnnnnnnnnnnnnnnnnnnnnnnnnnnnnnnnnnnnnnnnnnnnnnnnnnnnnnnnnnnnnnnnnnnnnnnnnnnnnnnnnnnnnnnnnnnnnnnnnnnnnnnnnnnnnnnnnnnnnnnnnnnnnnnnnnnnnnnnnnnnnnnnnnnnnnnnnnnnnnnnnnnnnnnnnnnnnnnnnnnnnnnnnnnnnnnnnnnnnnnnnnnnnnnnnnnnnnnnnnnnnnnnnnnnnnnnnnnnnnnnnnnnnnnnnnnnnnnnnnnnnnnnnnnnnnnnnnnnnnnnnnnnnnnnnnnnnnnnnnnnnnnnnnnnnnnnnnnnnnnnnnnnnnnnnnnnnnnnnnnnnnnnnnnnnnnnnnnnnnnnnnnnnnnnnnnnnnnnnnnnnnnnnnnnnnnnnnnnnnnnnnnnnnnnnnnnnnnnnnnnnnnnnnnnnnnnnnnnnnnnnnnnnnnnnnnnnnnnnnnnnnnnnnnnnnnnnnnnnnnnnnnnnnnnnnnnnnnnnnnnnnnnnnnnnnnnnnnnnnnnnnnnnnnnnnnnnnnnnnnnnnnnnnnnnnnnnnnnnnnnnnnnnnnnnnnnnnnnnnnnnnnnnnnnnnnnnnnnnnnnnnnnnnnnnnnnnnnnnnnnnnnnnnnnnnnnnnnnnnnnnnnnnnnnnnnnnnnnnnnnnnnnnnnnnnnnnnnnnnnnnnnnnnnnnnnnnnnnnnnnnnnnnnnnnnnnnnnnnnnnnnnnnnnnnnnnnnnnnnnnnnnnnnnnnnnnnnnnnnnnnnnnnnnnnnnnnnnnnnnnnnnnnnnnnnnnnnnnnnnnnnnnnnnnnnnnnnnnnnnnnnnnnnnnnnnnnnnnnnnnnnnnnnnnnnnnnnnnnnnnnnnnnnnnnnnnnnnnnnnnnnnnnnnnnnnnnnnnnnnnnnnnnnnnnnnnnnnnnnnnnnnnnnnnnnnnnnnnnnnnnnnnnnnnnnnnnnnnnnnnnnnnnnnnnnnnnnnnnnnnnnnnnnnnnnnnnnnnnnnnnnnnnnnnnnnnnnnnnnnnnnnnnnnnnnnnnnnnnnnnnnnnnnnnnnnnnnnnnnnnnnnnnnnnnnnnnnnnnnnnnnnnnnnnnnnnnnnnnnnnnnnnnnnnnnnnnnnnnnnnnnnnnnnnnnnnnnnnnnnnnnnnnnnnnnnnnnnnnnnnnnnnnnnnnnnnnnnnnnnnnnnnnnnnnnnnnnnnnnnnnnnnnnnnnnnnnnnnnnnnnnnnnnnnnnnnnnnnnnnnnnnnnnnnnnnnnnnnnnnnnnnnnnnnnnnnnnnnnnnnnnnnnnnnnnnnnnnnnnnnnnnnnnnnnnnnnnnnnnnnnnnnnnnnnnnnnnnnnnnnnnnnnnnnnnnnnnnnnnnnnnnnnnnnnnnnnnnnnnnnnnnnnnnnnnnnnnnnnnnnnnnnnnnnnnnnnnnnnnnnnnnnnnnnnnnnnnnnnnnnnnnnnnnnnnnnnnnnnnnnnnnnnnnnnnnnnnnnnnnnnnnnnnnnnnnnnnnnnnnnnnnnnnnnnnnnnnnnnnnnnnnnnnnnnnnnnnnnnnnnnnnnnnnnnnnnnnnnnnnnnnnnnnnnnnnnnnnnnnnnnnnnnnnnnnnnnnnnnnnnnnnnnnnnnnnnnnnnnnnnnnnnnnnnnnnnnnnnnnnnnnnnnnnnnnnnnnnnnnnnnnnnnnnnnnnnnnnnnnnnnnnnnnnnnnnnnnnnnnnnnnnnnnnnnnnnnnnnnnnnnnnnnnnnnnnnnnnnnnnnnnnnnnnnnnnnnnnnnnnnnnnnnnnnnnnnnnnnnnnnnnnnnnnnnnnnnnnnnnnnnnnnnnnnnnnnnnnnnnnnnnnnnnnnnnnnnnnnnnnnnnnnnnnnnnnnnnnnnnnnnnnnnnnnnnnnnnnnnnnnnnnnnnnnnnnnnnnnnnnnnnnnnnnnnnnnnnnnnnnnnnnnnnnnnnnnnnnnnnnnnnnnnnnnnnnnnnnnnnnnnnnnnnnnnnnnnnnnnnnnnnnnnnnnnnnnnnnnnnnnnnnnnnnnnnnnnnnnnnnnnnnnnnnnnnnnnnnnnnnnnnnnnnnnnnnnnnnnnnnnnnnnnnnnnnnnnnnnnnnnnnnnnnnnnnnnnnnnnnnnnnnnnnnnnnnnnnnnnnnnnnnnnnnnnnnnnnnnnnnnnnnnnnnnnnnnnnnnnnnnnnnnnnnnnnnnnnnnnnnnnnnnnnnnnnnnnnnnnnnnnnnnnnnnnnnnnnnnnnnnnnnnnnnnnnnnnnnnnnnnnnnnnnnnnnnnnnnnnnnnnnnnnnnnnnnnnnnnnnnnnnnnnnnnnnnnnnnnnnnnnnnnnnnnnnnnnnnnnnnnnnnnnnnnnnnnnnnnnnnnnnnnnnnnnnnnnnnnnnnnnnnnnnnnnnnnnnnnnnnnnnnnnnnnnnnnnnnnnnnnnnnnnnnnnnnnnnnnnnnnnnnnnnnnnnnnnnnnnnnnnnnnnnnnnnnnnnnnnnnnnnnnnnnnnnnnnnnnnnnnnnnnnnnnnnnnnnnnnnnnnnnnnnnnnnnnnnnnnnnnnnnnnnnnnnnnnnnnnnnnnnnnnnnnnnnnnnnnnnnnnnnnnnnnnnnnnnnnnnnnnnnnnnnnnnnnnnnnnnnnnnnnnnnnnnnnnnnnnnnnnnnnnnnnnnnnnnnnnnnnnnnnnnnnnnnnnnnnnnnnnnnnnnnnnnnnnnnnnnnnnnnnnnnnnnnnnnnnnnnnnnnnnnnnnnnnnnnnnnnnnnnnnnnnnnnnnnnnnnnnnnnnnnnnnnnnnnnnnnnnnnnnnnnnnnnnnnnnnnnnnnnnnnnnnnnnnnnnnnnnnnnnnnnnnnnnnnnnnnnnnnnnnnnnnnnnnnnnnnnnnnnnnnnnnnnnnnnnnnnnnnnnnnnnnnnnnnnnnnnnnnnnnnnnnnnnnnnnnnnnnnnnnnnnnnnnnnnnnnnnnnnnnnnnnnnnnnnnnnnnnnnnnnnnnnnnnnnnnnnnnnnnnnnnnnnnnnnnnnnnnnnnnnnnnnnnnnnnnnnnnnnnnnnnnnnnnnnnnnnnnnnnnnnnnnnnnnnnnnnnnnnnnnnnnnnnnnnnnnnnnnnnnnnnnnnnnnnnnnnnnnnnnnnnnnnnnnnnnnnnnnnnnnnnnnnnnnnnnnnnnnnnnnnnnnnnnnnnnnnnnnnnnnnnnnnnnnnnnnnnnnnnnnnnnnnnnnnnnnnnnnnnnnnnnnnnnnnnnnnnnnnnnnnnnnnnnnnnnnnnnnnnnnnnnnnnnnnnnnnnnnnnnnnnnnnnnnnnnnnnnnnnnnnnnnnnnnnnnnnnnnnnnnnnnnnnnnnnnnnnnnnnnnnnnnnnnnnnnnnnnnnnnnnnnnnnnnnnnnnnnnnnnnnnnnnnnnnnnnnnnnnnnnnnnnnnnnnnnnnnnnnnnnnnnnnnnnnnnnnnnnnnnnnnnnnnnnnnnnnnnnnnnnnnnnnnnnnnnnnnnnnnnnnnnnnnnnnnnnnnnnnnnnnnnnnnnnnnnnnnnnnnnnnnnnnnnnnnnnnnnnnnnnnnnnnnnnnnnnnnnnnnnnnnnnnnnnnnnnnnnnnnnnnnnnnnnnnnnnnnnnnnnnnnnnnnnnnnnnnnnnnnnnnnnnnnnnnnnnnnnnnnnnnnnnnnnnnnnnnnnnnnnnnnnnnnnnnnnnnnnnnnnnnnnnnnnnnnnnnnnnnnnnnnnnnnnnnnnnnnnnnnnnnnnnnnnnnnnnnnnnnnnnnnnnnnnnnnnnnnnnnnnnnnnnnnnnnnnnnnnnnnnnnnnnnnnnnnnnnnnnnnnnnnnnnnnnnnnnnnnnnnnnnnnnnnnnnnnnnnnnnnnnnnnnnnnnnnnnnnnnnnnnnnnnnnnnnnnnnnnnnnnnnnnnnnnnnnnnnnnnnnnnnnnnnnnnnnnnnnnnnnnnnnnnnnnnnnnnnnnnnnnnnnnnnnnnnnnnnnnnnnnnnnnnnnnnnnnnnnnnnnnnnnnnnnnnnnnnnnnnnnnnnnnnnnnnnnnnnnnnnnnnnnnnnnnnnnnnnnnnnnnnnnnnnnnnnnnnnnnnnnnnnnnnnnnnnnnnnnnnnnnnnnnnnnnnnnnnnnnnnnnnnnnnnnnnnnnnnnnnnnnnnnnnnnnnnnnnnnnnnnnnnnnnnnnnnnnnnnnnnnnnnnnnnnnnnnnnnnnnnnnnnnnnnnnnnnnnnnnnnnnnnnnnnnnnnnnnnnnnnnnnnnnnnnnnnnnnnnnnnnnnnnnnnnnnnnnnnnnnnnnnnnnnnnnnnnnnnnnnnnnnnnnnnnnnnnnnnnnnnnnnnnnnnnnnnnnnnnnnnnnnnnnnnnnnnnnnnnnnnnnnnnnnnnnnnnnnnnnnnnnnnnnnnnnnnnnnnnnnnnnnnnnnnnnnnnnnnnnnnnnnnnnnnnnnnnnnnnnnnnnnnnnnnnnnnnnnnnnnnnnnnnnnnnnnnnnnnnnnnnnnnnnnnnnnnnnnnnnnnnnnnnnnnnnnnnnnnnnnnnnnnnnnnnnnnnnnnnnnnnnnnnnnnnnnnnnnnnnnnnnnnnnnnnnnnnnnnnnnnnnnnnnnnnnnnnnnnnnnnnnnnnnnnnnnnnnnnnnnnnnnnnnnnnnnnnnnnnnnnnnnnnnnnnnnnnnnnnnnnnnnnnnnnnnnnnnnnnnnnnnnnnnnnnnnnnnnnnnnnnnnnnnnnnnnnnnnnnnnnnnnnnnnnnnnnnnnnnnnnnnnnnnnnnnnnnnnnnnnnnnnnnnnnnnnnnnnnnnnnnnnnnnnnnnnnnnnnnnnnnnnnnnnnnnnnnnnnnnnnnnnnnnnnnnnnnnnnnnnnnnnnnnnnnnnnnnnnnnnnnnnnnnnnnnnnnnnnnnnnnnnnnnnnnnnnnnnnnnnnnnnnnnnnnnnnnnnnnnnnnnnnnnnnnnnnnnnnnnnnnnnnnnnnnnnnnnnnnnnnnnnnnnnnnnnnnnnnnnnnnnnnnnnnnnnnnnnnnnnnnnnnnnnnnnnnnnnnnnnnnnnnnnnnnnnnnnnnnnnnnnnnnnnnnnnnnnnnnnnnnnnnnnnnnnnnnnnnnnnnnnnnnnnnnnnnnnnnnnnnnnnnnnnnnnnnnnnnnnnnnnnnnnnnnnnnnnnnnnnnnnnnnnnnnnnnnnnnnnnnnnnnnnnnnnnnnnnnnnnnnnnnnnnnnnnnnnnnnnnnnnnnnnnnnnnnnnnnnnnnnnnnnnnnnnnnnnnnnnnnnnnnnnnnnnnnnnnnnnnnnnnnnnnnnnnnnnnnnnnnnnnnnnnnnnnnnnnnnnnnnnnnnnnnnnnnnnnnnnnnnnnnnnnnnnnnnnnnnnnnnnnnnnnnnnnnnnnnnnnnnnnnnnnnnnnnnnnnnnnnnnnnnnnnnnnnnnnnnnnnnnnnnnnnnnnnnnnnnnnnnnnnnnnnnnnnnnnnnnnnnnnnnnnnnnnnnnnnnnnnnnnnnnnnnnnnnnnnnnnnnnnnnnnnnnnnnnnnnnnnnnnnnnnnnnnnnnnnnnnnnnnnnnnnnnnnnnnnnnnnnnnnnnnnnnnnnnnnnnnnnnnnnnnnnnnnnnnnnnnnnnnnnnnnnnnnnnnnnnnnnnnnnnnnnnnnnnnnnnnnnnnnnnnnnnnnnnnnnnnnnnnnnnnnnnnnnnnnnnnnnnnnnnnnnnnnnnnnnnnnnnnnnnnnnnnnnnnnnnnnnnnnnnnnnnnnnnnnnnnnnnnnnnnnnnnnnnnnnnnnnnnnnnnnnnnnnnnnnnnnnnnnnnnnnnnnnnnnnnnnnnnnnnnnnnnnnnnnnnnnnnnnnnnnnnnnnnnnnnnnnnnnnnnnnnnnnnnnnnnnnnnnnnnnnnnnnnnnnnnnnnnnnnnnnnnnnnnnnnnnnnnnnnnnnnnnnnnnnnnnnnnnnnnnnnnnnnnnnnnnnnnnnnnnnnnnnnnnnnnnnnnnnnnnnnnnnnnnnnnnnnnnnnnnnnnnnnnnnnnnnnnnnnnnnnnnnnnnnnnnnnnnnnnnnnnnnnnnnnnnnnnnnnnnnnnnnnnnnnnnnnnnnnnnnnnnnnnnnnnnnnnnnnnnnnnnnnnnnnnnnnnnnnnnnnnnnnnnnnnnnnnnnnnnnnnnnnnnnnnnnnnnnnnnnnnnnnnnnnnnnnnnnnnnnnnnnnnnnnnnnnnnnnnnnnnnnnnnnnnnnnnnnnnnnnnnnnnnnnnnnnnnnnnnnnnnnnnnnnnnnnnnnnnnnnnnnnnnnnnnnnnnnnnnnnnnnnnnnnnnnnnnnnnnnnnnnnnnnnnnnnnnnnnnnnnnnnnnnnnnnnnnnnnnnnnnnnnnnnnnnnnnnnnnnnnnnnnnnnnnnnnnnnnnnnnnnnnnnnnnnnnnnnnnnnnnnnnnnnnnnnnnnnnnnnnnnnnnnnnnnnnnnnnnnnnnnnnnnnnnnnnnnnnnnnnnnnnnnnnnnnnnnnnnnnnnnnnnnnnnnnnnnnnnnnnnnnnnnnnnnnnnnnnnnnnnnnnnnnnnnnnnnnnnnnnnnnnnnnnnnnnnnnnnnnnnnnnnnnnnnnnnnnnnnnnnnnnnnnnnnnnnnnnnnnnnnnnnnnnnnnnnnnnnnnnnnnnnnnnnnnnnnnnnnnnnnnnnnnnnnnnnnnnnnnnnnnnnnnnnnnnnnnnnnnnnnnnnnnnnnnnnnnnnnnnnnnnnnnnnnnnnnnnnnnnnnnnnnnnnnnnnnnnnnnnnnnnnnnnnnnnnnnnnnnnnnnnnnnnnnnnnnnnnnnnnnnnnnnnnnnnnnnnnnnnnnnnnnnnnnnnnnnnnnnnnnnnnnnnnnnnnnnnnnnnnnnnnnnnnnnnnnnnnnnnnnnnnnnnnnnnnnnnnnnnnnnnnnnnnnnnnnnnnnnnnnnnnnnnnnnnnnnnnnnnnnnnnnnnnnnnnnnnnnnnnnnnnnnnnnnnnnnnnnnnnnnnnnnnnnnnnnnnnnnnnnnnnnnnnnnnnnnnnnnnnnnnnnnnnnnnnnnnnnnnnnnnnnnnnnnnnnnnnnnnnnnnnnnnnnnnnnnnnnnnnnnnnnnnnnnnnnnnnnnnnnnnnnnnnnnnnnnnnnnnnnnnnnnnnnnnnnnnnnnnnnnnnnnnnnnnnnnnnnnnnnnnnnnnnnnnnnnnnnnnnnnnnnnnnnnnnnnnnnnnnnnnnnnnnnnnnnnnnnnnnnnnnnnnnnnnnnnnnnnnnnnnnnnnnnnnnnnnnnnnnnnnnnnnnnnnnnnnnnnnnnnnnnnnnnnnnnnnnnnnnnnnnnnnnnnnnnnnnnnnnnnnnnnnnnnnnnnnnnnnnnnnnnnnnnnnnnnnnnnnnnnnnnnnnnnnnnnnnnnnnnnnnnnnnnnnnnnnnnnnnnnnnnnnnnnnnnnnnnnnnnnnnnnnnnnnnnnnnnnnnnnnnnnnnnnnnnnnnnnnnnnnnnnnnnnnnnnnnnnnnnnnnnnnnnnnnnnnnnnnnnnnnnnnnnnnnnnnnnnnnnnnnnnnnnnnnnnnnnnnnnnnnnnnnnnnnnnnnnnnnnnnnnnnnnnnnnnnnnnnnnnnnnnnnnnnnnnnnnnnnnnnnnnnnnnnnnnnnnnnnnnnnnnnnnnnnnnnnnnnnnnnnnnnnnnnnnnnnnnnnnnnnnnnnnnnnnnnnnnnnnnnnnnnnnnnnnnnnnnnnnnnnnnnnnnnnnnnnnnnnnnnnnnnnnnnnnnnnnnnnnnnnnnnnnnnnnnnnnnnnnnnnnnnnnnnnnnnnnnnnnnnnnnnnnnnnnnnnnnnnnnnnnnnnnnnnnnnnnnnnnnnnnnnnnnnnnnnnnnnnnnnnnnnnnnnnnnnnnnnnnnnnnnnnnnnnnnnnnnnnnnnnnnnnnnnnnnnnnnnnnnnnnnnnnnnnnnnnnnnnnnnnnnnnnnnnnnnnnnnnnnnnnnnnnnnnnnnnnnnnnnnnnnnnnnnnnnnnnnnnnnnnnnnnnnnnnnnnnnnnnnnnnnnnnnnnnnnnnnnnnnnnnnnnnnnnnnnnnnnnnnnnnnnnnnnnnnnnnnnnnnnnnnnnnnnnnnnnnnnnnnnnnnnnnnnnnnnnnnnnnnnnnnnnnnnnnnnnnnnnnnnnnnnnnnnnnnnnnnnnnnnnnnnnnnnnnnnnnnnnnnnnnnnnnnnnnnnnnnnnnnnnnnnnnnnnnnnnnnnnnnnnnnnnnnnnnnnnnnnnnnnnnnnnnnnnnnnnnnnnnnnnnnnnnnnnnnnnnnnnnnnnnnnnnnnnnnnnnnnnnnnnnnnnnnnnnnnnnnnnnnnnnnnnnnnnnnnnnnnnnnnnnnnnnnnnnnnnnnnnnnnnnnnnnnnnnnnnnnnnnnnnnnnnnnnnnnnnnnnnnnnnnnnnnnnnnnnnnnnnnnnnnnnnnnnnnnnnnnnnnnnnnnnnnnnnnnnnnnnnnnnnnnnnnnnnnnnnnnnnnnnnnnnnnnnnnnnnnnnnnnnnnnnnnnnnnnnnnnnnnnnnnnnnnnnnnnnnnnnnnnnnnnnnnnnnnnnnnnnnnnnnnnnnnnnnnnnnnnnnnnnnnnnnnnnnnnnnnnnnnnnnnnnnnnnnnnnnnnnnnnnnnnnnnnnnnnnnnnnnnnnnnnnnnnnnnnnnnnnnnnnnnnnnnnnnnnnnnnnnnnnnnnnnnnnnnnnnnnnnnnnnnnnnnnnnnnnnnnnnnnnnnnnnnnnnnnnnnnnnnnnnnnnnnnnnnnnnnnnnnnnnnnnnnnnnnnnnnnnnnnnnnnnnnnnnnnnnnnnnnnnnnnnnnnnnnnnnnnnnnnnnnnnnnnnnnnnnnnnnnnnnnnnnnnnnnnnnnnnnnnnnnnnnnnnnnnnnnnnnnnnnnnnnnnnnnnnnnnnnnnnnnnnnnnnnnnnnnnnnnnnnnnnnnnnnnnnnnnnnnnnnnnnnnnnnnnnnnnnnnnnnnnnnnnnnnnnnnnnnnnnnnnnnnnnnnnnnnnnnnnnnnnnnnnnnnnnnnnnnnnnnnnnnnnnnnnnnnnnnnnnnnnnnnnnnnnnnnnnnnnnnnnnnnnnnnnnnnnnnnnnnnnnnnnnnnnnnnnnnnnnnnnnnnnnnnnnnnnnnnnnnnnnnnnnnnnnnnnnnnnnnnnnnnnnnnnnnnnnnnnnnnnnnnnnnnnnnnnnnnnnnnnnnnnnnnnnnnnnnnnnnnnnnnnnnnnnnnnnnnnnnnnnnnnnnnnnnnnnnnnnnnnnnnnnnnnnnnnnnnnnnnnnnnnnnnnnnnnnnnnnnnnnnnnnnnnnnnnnnnnnnnnnnnnnnnnnnnnnnnnnnnnnnnnnnnnnnnnnnnnnnnnnnnnnnnnnnnnnnnnnnnnnnnnnnnnnnnnnnnnnnnnnnnnnnnnnnnnnnnnnnnnnnnnnnnnnnnnnnnnnnnnnnnnnnnnnnnnnnnnnnnnnnnnnnnnnnnnnnnnnnnnnnnnnnnnnnnnnnnnnnnnnnnnnnnnnnnnnnnnnnnnnnnnnnnnnnnnnnnnnnnnnnnnnnnnnnnnnnnnnnnnnnnnnnnnnnnnnnnnnnnnnnnnnnnnnnnnnnnnnnnnnnnnnnnnnnnnnnnnnnnnnnnnnnnnnnnnnnnnnnnnnnnnnnnnnnnnnnnnnnnnnnnnnnnnnnnnnnnnnnnnnnnnnnnnnnnnnnnnnnnnnnnnnnnnnnnnnnnnnnnnnnnnnnnnnnnnnnnnnnnnnnnnnnnnnnnnnnnnnnnnnnnnnnnnnnnnnnnnnnnnnnnnnnnnnnnnnnnnnnnnnnnnnnnnnnnnnnnnnnnnnnnnnnnnnnnnnnnnnnnnnnnnnnnnnnnnnnnnnnnnnnnnnnnnnnnnnnnnnnnnnnnnnnnnnnnnnnnnnnnnnnnnnnnnnnnnnnnnnnnnnnnnnnnnnnnnnnnnnnnnnnnnnnnnnnnnnnnnnnnnnnnnnnnnnnnnnnnnnnnnnnnnnnnnnnnnnnnnnnnnnnnnnnnnnnnnnnnnnnnnnnnnnnnnnnnnnnnnnnnnnnnnnnnnnnnnnnnnnnnnnnnnnnnnnnnnnnnnnnnnnnnnnnnnnnnnnnnnnnnnnnnnnnnnnnnnnnnnnnnnnnnnnnnnnnnnnnnnnnnnnnnnnnnnnnnnnnnnnnnnnnnnnnnnnnnnnnnnnnnnnnnnnnnnnnnnnnnnnnnnnnnnnnnnnnnnnnnnnnnnnnnnnnnnnnnnnnnnnnnnnnnnnnnnnnnnnnnnnnnnnnnnnnnnnnnnnnnnnnnnnnnnnnnnnnnnnnnnnnnnnnnnnnnnnnnnnnnnnnnnnnnnnnnnnnnnnnnnnnnnnnnnnnnnnnnnnnnnnnnnnnnnnnnnnnnnnnnnnnnnnnnnnnnnnnnnnnnnnnnnnnnnnnnnnnnnnnnnnnnnnnnnnnnnnnnnnnnnnnnnnnnnnnnnnnnnnnnnnnnnnnnnnnnnnnnnnnnnnnnnnnnnnnnnnnnnnnnnnnnnnnnnnnnnnnnnnnnnnnnnnnnnnnnnnnnnnnnnnnnnnnnnnnnnnnnnnnnnnnnnnnnnnnnnnnnnnnnnnnnnnnnnnnnnnnnnnnnnnnnnnnnnnnnnnnnnnnnnnnnnnnnnnnnnnnnnnnnnnnnnnnnnnnnnnnnnnnnnnnnnnnnnnnnnnnnnnnnnnnnnnnnnnnnnnnnnnnnnnnnnnnnnnnnnnnnnnnnnnnnnnnnnnnnnnnnnnnnnnnnnnnnnnnnnnnnnnnnnnnnnnnnnnnnnnnnnnnnnnnnnnnnnnnnnnnnnnnnnnnnnnnnnnnnnnnnnnnnnnnnnnnnnnnnnnnnnnnnnnnnnnnnnnnnnnnnnnnnnnnnnnnnnnnnnnnnnnnnnnnnnnnnnnnnnnnnnnnnnnnnnnnnnnnnnnnnnnnnnnnnnnnnnnnnnnnnnnnnnnnnnnnnnnnnnnnnnnnnnnnnnnnnnnnnnnnnnnnnnnnnnnnnnnnnnnnnnnnnnnnnnnnnnnnnnnnnnnnnnnnnnnnnnnnnnnnnnnnnnnnnnnnnnnnnnnnnnnnnnnnnnnnnnnnnnnnnnnnnnnnnnnnnnnnnnnnnnnnnnnnnnnnnnnnnnnnnnnnnnnnnnnnnnnnnnnnnnnnnnnnnnnnnnnnnnnnnnnnnnnnnnnnnnnnnnnnnnnnnnnnnnnnnnnnnnnnnnnnnnnnnnnnnnnnnnnnnnnnnnnnnnnnnnnnnnnnnnnnnnnnnnnnnnnnnnnnnnnnnnnnnnnnnnnnnnnnnnnnnnnnnnnnnnnnnnnnnnnnnnnnnnnnnnnnnnnnnnnnnnnnnnnnnnnnnnnnnnnnnnnnnnnnnnnnnnnnnnnnnnnnnnnnnnnnnnnnnnnnnnnnnnnnnnnnnnnnnnnnnnnnnnnnnnnnnnnnnnnnnnnnnnnnnnnnnnnnnnnnnnnnnnnnnnnnnnnnnnnnnnnnnnnnnnnnnnnnnnnnnnnnnnnnnnnnnnnnnnnnnnnnnnnnnnnnnnnnnnnnnnnnnnnnnnnnnnnnnnnnnnnnnnnnnnnnnnnnnnnnnnnnnnnnnnnnnnnnnnnnnnnnnnnnnnnnnnnnnnnnnnnnnnnnnnnnnnnnnnnnnnnnnnnnnnnnnnnnnnnnnnnnnnnnnnnnnnnnnnnnnnnnnnnnnnnnnnnnnnnnnnnnnnnnnnnnnnnnnnnnnnnnnnnnnnnnnnnnnnnnnnnnnnnnnnnnnnnnnnnnnnnnnnnnnnnnnnnnnnnnnnnnnnnnnnnnnnnnnnnnnnnnnnnnnnnnnnnnnnnnnnnnnnnnnnnnnnnnnnnnnnnnnnnnnnnnnnnnnnnnnnnnnnnnnnnnnnnnnnnnnnnnnnnnnnnnnnnnnnnnnnnnnnnnnnnnnnnnnnnnnnnnnnnnnnnnnnnnnnnnnnnnnnnnnnnnnnnnnnnnnnnnnnnnnnnnnnnnnnnnnnnnnnnnnnnnnnnnnnnnnnnnnnnnnnnnnnnnnnnnnnnnnnnnnnnnnnnnnnnnnnnnnnnnnnnnnnnnnnnnnnnnnnnnnnnnnnnnnnnnnnnnnnnnnnnnnnnnnnnnnnnnnnnnnnnnnnnnnnnnnnnnnnnnnnnnnnnnnnnnnnnnnnnnnnnnnnnnnnnnnnnnnnnnnnnnnnnnnnnnnnnnnnnnnnnnnnnnnnnnnnnnnnnnnnnnnnnnnnnnnnnnnnnnnnnnnnnnnnnnnnnnnnnnnnnnnnnnnnnnnnnnnnnnnnnnnnnnnnnnnnnnnnnnnnnnnnnnnnnnnnnnnnnnnnnnnnnnnnnnnnnnnnnnnnnnnnnnnnnnnnnnnnnnnnnnnnnnnnnnnnnnnnnnnnnnnnnnnnnnnnnnnnnnnnnnnnnnnnnnnnnnnnnnnnnnnnnnnnnnnnnnnnnnnnnnnnnnnnnnnnnnnnnnnnnnnnnnnnnnnnnnnnnnnnnnnnnnnnnnnnnnnnnnnnnnnnnnnnnnnnnnnnnnnnnnnnnnnnnnnnnnnnnnnnnnnnnnnnnnnnnnnnnnnnnnnnnnnnnnnnnnnnnnnnnnnnnnnnnnnnnnnnnnnnnnnnnnnnnnnnnnnnnnnnnnnnnnnnnnnnnnnnnnnnnnnnnnnnnnnnnnnnnnnnnnnnnnnnnnnnnnnnnnnnnnnnnnnnnnnnnnnnnnnnnnnnnnnnnnnnnnnnnnnnnnnnnnnnnnnnnnnnnnnnnnnnnnnnnnnnnnnnnnnnnnnnnnnnnnnnnnnnnnnnnnnnnnnnnnnnnnnnnnnnnnnnnnnnnnnnnnnnnnnnnnnnnnnnnnnnnnnnnnnnnnnnnnnnnnnnnnnnnnnnnnnnnnnnnnnnnnnnnnnnnnnnnnnnnnnnnnnnnnnnnnnnnnnnnnnnnnnnnnnnnnnnnnnnnnnnnnnnnnnnnnnnnnnnnnnnnnnnnnnnnnnnnnnnnnnnnnnnnnnnnnnnnnnnnnnnnnnnnnnnnnnnnnnnnnnnnnnnnnnnnnnnnnnnnnnnnnnnnnnnnnnnnnnnnnnnnnnnnnnnnnnnnnnnnnnnnnnnnnnnnnnnnnnnnnnnnnnnnnnnnnnnnnnnnnnnnnnnnnnnnnnnnnnnnnnnnnnnnnnnnnnnnnnnnnnnnnnnnnnnnnnnnnnnnnnnnnnnnnnnnnnnnnnnnnnnnnnnnnnnnnnnnnnnnnnnnnnnnnnnnnnnnnnnnnnnnnnnnnnnnnnnnnnnnnnnnnnnnnnnnnnnnnnnnnnnnnnnnnnnnnnnnnnnnnnnnnnnnnnnnnnnnnnnnnnnnnnnnnnnnnnnnnnnnnnnnnnnnnnnnnnnnnnnnnnnnnnnnnnnnnnnnnnnnnnnnnnnnnnnnnnnnnnnnnnnnnnnnnnnnnnnnnnnnnnnnnnnnnnnnnnnnnnnnnnnnnnnnnnnnnnnnnnnnnnnnnnnnnnnnnnnnnnnnnnnnnnnnnnnnnnnnnnnnnnnnnnnnnnnnnnnnnnnnnnnnnnnnnnnnnnnnnnnnnnnnnnnnnnnnnnnnnnnnnnnnnnnnnnnnnnnnnnnnnnnnnnnnnnnnnnnnnnnnnnnnnnnnnnnnnnnnnnnnnnnnnnnnnnnnnnnnnnnnnnnnnnnnnnnnnnnnnnnnnnnnnnnnnnnnnnnnnnnnnnnnnnnnnnnnnnnnnnnnnnnnnnnnnnnnnnnnnnnnnnnnnnnnnnnnnnnnnnnnnnnnnnnnnnnnnnnnnnnnnnnnnnnnnnnnnnnnnnnnnnnnnnnnnnnnnnnnnnnnnnnnnnnnnnnnnnnnnnnnnnnnnnnnnnnnnnnnnnnnnnnnnnnnnnnnnnnnnnnnnnnnnnnnnnnnnnnnnnnnnnnnnnnnnnnnnnnnnnnnnnnnnnnnnnnnnnnnnnnnnnnnnnnnnnnnnnnnnnnnnnnnnnnnnnnnnnnnnnnnnnnnnnnnnnnnnnnnnnnnnnnnnnnnnnnnnnnnnnnnnnnnnnnnnnnnnnnnnnnnnnnnnnnnnnnnnnnnnnnnnnnnnnnnnnnnnnnnnnnnnnnnnnnnnnnnnnnnnnnnnnnnnnnnnnnnnnnnnnnnnnnnnnnnnnnnnnnnnnnnnnnnnnnnnnnnnnnnnnnnnnnnnnnnnnnnnnnnnnnnnnnnnnnnnnnnnnnnnnnnnnnnnnnnnnnnnnnnnnnnnnnnnnnnnnnnnnnnnnnnnnnnnnnnnnnnnnnnnnnnnnnnnnnnnnnnnnnnnnnnnnnnnnnnnnnnnnnnnnnnnnnnnnnnnnnnnnnnnnnnnnnnnnnnnnnnnnnnnnnnnnnnnnnnnnnnnnnnnnnnnnnnnnnnnnnnnnnnnnnnnnnnnnnnnnnnnnnnnnnnnnnnnnnnnnnnnnnnnnnnnnnnnnnnnnnnnnnnnnnnnnnnnnnnnnnnnnnnnnnnnnnnnnnnnnnnnnnnnnnnnnnnnnnnnnnnnnnnnnnnnnnnnnnnnnnnnnnnnnnnnnnnnnnnnnnnnnnnnnnnnnnnnnnnnnnnnnnnnnnnnnnnnnnnnnnnnnnnnnnnnnnnnnnnnnnnnnnnnnnnnnnnnnnnnnnnnnnnnnnnnnnnnnnnnnnnnnnnnnnnnnnnnnnnnnnnnnnnnnnnnnnnnnnnnnnnnnnnnnnnnnnnnnnnnnnnnnnnnnnnnnnnnnnnnnnnnnnnnnnnnnnnnnnnnnnnnnnnnnnnnnnnnnnnnnnnnnnnnnnnnnnnnnnnnnnnnnnnnnnnnnnnnnnnnnnnnnnnnnnnnnnnnnnnnnnnnnnnnnnnnnnnnnnnnnnnnnnnnnnnnnnnnnnnnnnnnnnnnnnnnnnnnnnnnnnnnnnnnnnnnnnnnnnnnnnnnnnnnnnnnnnnnnnnnnnnnnnnnnnnnnnnnnnnnnnnnnnnnnnnnnnnnnnnnnnnnnnnnnnnnnnnnnnnnnnnnnnnnnnnnnnnnnnnnnnnnnnnnnnnnnnnnnnnnnnnnnnnnnnnnnnnnnnnnnnnnnnnnnnnnnnnnnnnnnnnnnnnnnnnnnnnnnnnnnnnnnnnnnnnnnnnnnnnnnnnnnnnnnnnnnnnnnnnnnnnnnnnnnnnnnnnnnnnnnnnnnnnnnnnnnnnnnnnnnnnnnnnnnnnnnnnnnnnnnnnnnnnnnnnnnnnnnnnnnnnnnnnnnnnnnnnnnnnnnnnnnnnnnnnnnnnnnnnnnnnnnnnnnnnnnnnnnnnnnnnnnnnnnnnnnnnnnnnnnnnnnnnnnnnnnnnnnnnnnnnnnnnnnnnnnnnnnnnnnnnnnnnnnnnnnnnnnnnnnnnnnnnnnnnnnnnnnnnnnnnnnnnnnnnnnnnnnnnnnnnnnnnnnnnnnnnnnnnnnnnnnnnnnnnnnnnnnnnnnnnnnnnnnnnnnnnnnnnnnnnnnnnnnnnnnnnnnnnnnnnnnnnnnnnnnnnnnnnnnnnnnnnnnnnnnnnnnnnnnnnnnnnnnnnnnnnnnnnnnnnnnnnnnnnnnnnnnnnnnnnnnnnnnnnnnnnnnnnnnnnnnnnnnnnnnnnnnnnnnnnnnnnnnnnnnnnnnnnnnnnnnnnnnnnnnnnnnnnnnnnnnnnnnnnnnnnnnnnnnnnnnnnnnnnnnnnnnnnnnnnnnnnnnnnnnnnnnnnnnnnnnnnnnnnnnnnnnnnnnnnnnnnnnnnnnnnnnnnnnnnnnnnnnnnnnnnnnnnnnnnnnnnnnnnnnnnnnnnnnnnnnnnnnnnnnnnnnnnnnnnnnnnnnnnnnnnnnnnnnnnnnnnnnnnnnnnnnnnnnnnnnnnnnnnnnnnnnnnnnnnnnnnnnnnnnnnnnnnnnnnnnnnnnnnnnnnnnnnnnnnnnnnnnnnnnnnnnnnnnnnnnnnnnnnnnnnnnnnnnnnnnnnnnnnnnnnnnnnnnnnnnnnnnnnnnnnnnnnnnnnnnnnnnnnnnnnnnnnnnnnnnnnnnnnnnnnnnnnnnnnnnnnnnnnnnnnnnnnnnnnnnnnnnnnnnnnnnnnnnnnnnnnnnnnnnnnnnnnnnnnnnnnnnnnnnnnnnnnnnnnnnnnnnnnnnnnnnnnnnnnnnnnnnnnnnnnnnnnnnnnnnnnnnnnnnnnnnnnnnnnnnnnnnnnnnnnnnnnnnnnnnnnnnnnnnnnnnnnnnnnnnnnnnnnnnnnnnnnnnnnnnnnnnnnnnnnnnnnnnnnnnnnnnnnnnnnnnnnnnnnnnnnnnnnnnnnnnnnnnnnnnnnnnnnnnnnnnnnnnnnnnnnnnnnnnnnnnnnnnnnnnnnnnnnnnnnnnnnnnnnnnnnnnnnnnnnnnnnnnnnnnnnnnnnnnnnnnnnnnnnnnnnnnnnnnnnnnnnnnnnnnnnnnnnnnnnnnnnnnnnnnnnnnnnnnnnnnnnnnnnnnnnnnnnnnnnnnnnnnnnnnnnnnnnnnnnnnnnnnnnnnnnnnnnnnnnnnnnnnnnnnnnnnnnnnnnnnnnnnnnnnnnnnnnnnnnnnnnnnnnnnnnnnnnnnnnnnnnnnnnnnnnnnnnnnnnnnnnnnnnnnnnnnnnnnnnnnnnnnnnnnnnnnnnnnnnnnnnnnnnnnnnnnnnnnnnnnnnnnnnnnnnnnnnnnnnnnnnnnnnnnnnnnnnnnnnnnnnnnnnnnnnnnnnnnnnnnnnnnnnnnnnnnnnnnnnnnnnnnnnnnnnnnnnnnnnnnnnnnnnnnnnnnnnnnnnnnnnnnnnnnnnnnnnnnnnnnnnnnnnnnnnnnnnnnnnnnnnnnnnnnnnnnnnnnnnnnnnnnnnnnnnnnnnnnnnnnnnnnnnnnnnnnnnnnnnnnnnnnnnnnnnnnnnnnnnnnnnnnnnnnnnnnnnnnnnnnnnnnnnnnnnnnnnnnnnnnnnnnnnnnnnnnnnnnnnnnnnnnnnnnnnnnnnnnnnnnnnnnnnnnnnnnnnnnnnnnnnnnnnnnnnnnnnnnnnnnnnnnnnnnnnnnnnnnnnnnnnnnnnnnnnnnnnnnnnnnnnnnnnnnnnnnnnnnnnnnnnnnnnnnnnnnnnnnnnnnnnnnnnnnnnnnnnnnnnnnnnnnnnnnnnnnnnnnnnnnnnnnnnnnnnnnnnnnnnnnnnnnnnnnnnnnnnnnnnnnnnnnnnnnnnnnnnnnnnnnnnnnnnnnnnnnnnnnnnnnnnnnnnnnnnnnnnnnnnnnnnnnnnnnnnnnnnnnnnnnnnnnnnnnnnnnnnnnnnnnnnnnnnnnnnnnnnnnnnnnnnnnnnnnnnnnnnnnnnnnnnnnnnnnnnnnnnnnnnnnnnnnnnnnnnnnnnnnnnnnnnnnnnnnnnnnnnnnnnnnnnnnnnnnnnnnnnnnnnnnnnnnnnnnnnnnnnnnnnnnnnnnnnnnnnnnnnnnnnnnnnnnnnnnnnnnnnnnnnnnnnnnnnnnnnnnnnnnnnnnnnnnnnnnnnnnnnnnnnnnnnnnnnnnnnnnnnnnnnnnnnnnnnnnnnnnnnnnnnnnnnnnnnnnnnnnnnnnnnnnnnnnnnnnnnnnnnnnnnnnnnnnnnnnnnnnnnnnnnnnnnnnnnnnnnnnnnnnnnnnnnnnnnnnnnnnnnnnnnnnnnnnnnnnnnnnnnnnnnnnnnnnnnnnnnnnnnnnnnnnnnnnnnnnnnnnnnnnnnnnnnnnnnnnnnnnnnnnnnnnnnnnnnnnnnnnnnnnnnnnnnnnnnnnnnnnnnnnnnnnnnnnnnnnnnnnnnnnnnnnnnnnnnnnnnnnnnnnnnnnnnnnnnnnnnnnnnnnnnnnnnnnnnnnnnnnnnnnnnnnnnnnnnnnnnnnnnnnnnnnnnnnnnnnnnnnnnnnnnnnnnnnnnnnnnnnnnnnnnnnnnnnnnnnnnnnnnnnnnnnnnnnnnnnnnnnnnnnnnnnnnnnnnnnnnnnnnnnnnnnnnnnnnnnnnnnnnnnnnnnnnnnnnnnnnnnnnnnnnnnnnnnnnnnnnnnnnnnnnnnnnnnnnnnnnnnnnnnnnnnnnnnnnnnnnnnnnnnnnnnnnnnnnnnnnnnnnnnnnnnnnnnnnnnnnnnnnnnnnnnnnnnnnnnnnnnnnnnnnnnnnnnnnnnnnnnnnnnnnnnnnnnnnnnnnnnnnnnnnnnnnnnnnnnnnnnnnnnnnnnnnnnnnnnnnnnnnnnnnnnnnnnnnnnnnnnnnnnnnnnnnnnnnnnnnnnnnnnnnnnnnnnnnnnnnnnnnnnnnnnnnnnnnnnnnnnnnnnnnnnnnnnnnnnnnnnnnnnnnnnnnnnnnnnnnnnnnnnnnnnnnnnnnnnnnnnnnnnnnnnnnnnnnnnnnnnnnnnnnnnnnnnnnnnnnnnnnnnnnnnnnnnnnnnnnnnnnnnnnnnnnnnnnnnnnnnnnnnnnnnnnnnnnnnnnnnnnnnnnnnnnnnnnnnnnnnnnnnnnnnnnnnnnnnnnnnnnnnnnnnnnnnnnnnnnnnnnnnnnnnnnnnnnnnnnnnnnnnnnnnnnnnnnnnnnnnnnnnnnnnnnnnnnnnnnnnnnnnnnnnnnnnnnnnnnnnnnnnnnnnnnnnnnnnnnnnnnnnnnnnnnnnnnnnnnnnnnnnnnnnnnnnnnnnnnnnnnnnnnnnnnnnnnnnnnnnnnnnnnnnnnnnnnnnnnnnnnnnnnnnnnnnnnnnnnnnnnnnnnnnnnnnnnnnnnnnnnnnnnnnnnnnnnnnnnnnnnnnnnnnnnnnnnnnnnnnnnnnnnnnnnnnnnnnnnnnnnnnnnnnnnnnnnnnnnnnnnnnnnnnnnnnnnnnnnnnnnnnnnnnnnnnnnnnnnnnnnnnnnnnnnnnnnnnnnnnnnnnnnnnnnnnnnnnnnnnnnnnnnnnnnnnnnnnnnnnnnnnnnnnnnnnnnnnnnnnnnnnnnnnnnnnnnnnnnnnnnnnnnnnnnnnnnnnnnnnnnnnnnnnnnnnnnnnnnnnnnnnnnnnnnnnnnnnnnnnnnnnnnnnnnnnnnnnnnnnnnnnnnnnnnnnnnnnnnnnnnnnnnnnnnnnnnnnnnnnnnnnnnnnnnnnnnnnnnnnnnnnnnnnnnnnnnnnnnnnnnnnnnnnnnnnnnnnnnnnnnnnnnnnnnnnnnnnnnnnnnnnnnnnnnnnnnnnnnnnnnnnnnnnnnnnnnnnnnnnnnnnnnnnnnnnnnnnnnnnnnnnnnnnnnnnnnnnnnnnnnnnnnnnnnnnnnnnnnnnnnnnnnnnnnnnnnnnnnnnnnnnnnnnnnnnnnnnnnnnnnnnnnnnnnnnnnnnnnnnnnnnnnnnnnnnnnnnnnnnnnnnnnnnnnnnnnnnnnnnnnnnnnnnnnnnnnnnnnnnnnnnnnnnnnnnnnnnnnnnnnnnnnnnnnnnnnnnnnnnnnnnnnnnnnnnnnnnnnnnnnnnnnnnnnnnnnnnnnnnnnnnnnnnnnnnnnnnnnnnnnnnnnnnnnnnnnnnnnnnnnnnnnnnnnnnnnnnnnnnnnnnnnnnnnnnnnnnnnnnnnnnnnnnnnnnnnnnnnnnnnnnnnnnnnnnnnnnnnnnnnnnnnnnnnnnnnnnnnnnnnnnnnnnnnnnnnnnnnnnnnnnnnnnnnnnnnnnnnnnnnnnnnnnnnnnnnnnnnnnnnnnnnnnnnnnnnnnnnnnnnnnnnnnnnnnnnnnnnnnnnnnnnnnnnnnnnnnnnnnnnnnnnnnnnnnnnnnnnnnnnnnnnnnnnnnnnnnnnnnnnnnnnnnnnnnnnnnnnnnnnnnnnnnnnnnnnnnnnnnnnnnnnnnnnnnnnnnnnnnnnnnnnnnnnnnnnnnnnnnnnnnnnnnnnnnnnnnnnnnnnnnnnnnnnnnnnnnnnnnnnnnnnnnnnnnnnnnnnnnnnnnnnnnnnnnnnnnnnnnnnnnnnnnnnnnnnnnnnnnnnnnnnnnnnnnnnnnnnnnnnnnnnnnnnnnnnnnnnnnnnnnnnnnnnnnnnnnnnnnnnnnnnnnnnnnnnnnnnnnnnnnnnnnnnnnnnnnnnnnnnnnnnnnnnnnnnnnnnnnnnnnnnnnnnnnnnnnnnnnnnnnnnnnnnnnnnnnnnnnnnnnnnnnnnnnnnnnnnnnnnnnnnnnnnnnnnnnnnnnnnnnnnnnnnnnnnnnnnnnnnnnnnnnnnnnnnnnnnnnnnnnnnnnnnnnnnnnnnnnnnnnnnnnnnnnnnnnnnnnnnnnnnnnnnnnnnnnnnnnnnnnnnnnnnnnnnnnnnnnnnnnnnnnnnnnnnnnnnnnnnnnnnnnnnnnnnnnnnnnnnnnnnnnnnnnnnnnnnnnnnnnnnnnnnnnnnnnnnnnnnnnnnnnnnnnnnnnnnnnnnnnnnnnnnnnnnnnnnnnnnnnnnnnnnnnnnnnnnnnnnnnnnnnnnnnnnnnnnnnnnnnnnnnnnnnnnnnnnnnnnnnnnnnnnnnnnnnnnnnnnnnnnnnnnnnnnnnnnnnnnnnnnnnnnnnnnnnnnnnnnnnnnnnnnnnnnnnnnnnnnnnnnnnnnnnnnnnnnnnnnnnnnnnnnnnnnnnnnnnnnnnnnnnnnnnnnnnnnnnnnnnnnnnnnnnnnnnnnnnnnnnnnnnnnnnnnnnnnnnnnnnnnnnnnnnnnnnnnnnnnnnnnnnnnnnnnnnnnnnnnnnnnnnnnnnnnnnnnnnnnnnnnnnnnnnnnnnnnnnnnnnnnnnnnnnnnnnnnnnnnnnnnnnnnnnnnnnnnnnnnnnnnnnnnnnnnnnnnnnnnnnnnnnnnnnnnnnnnnnnnnnnnnnnnnnnnnnnnnnnnnnnnnnnnnnnnnnnnnnnnnnnnnnnnnnnnnnnnnnnnnnnnnnnnnnnnnnnnnnnnnnnnnnnnnnnnnnnnnnnnnnnnnnnnnnnnnnnnnnnnnnnnnnnnnnnnnnnnnnnnnnnnnnnnnnnnnnnnnnnnnnnnnnnnnnnnnnnnnnnnnnnnnnnnnnnnnnnnnnnnnnnnnnnnnnnnnnnnnnnnnnnnnnnnnnnnnnnnnnnnnnnnnnnnnnnnnnnnnnnnnnnnnnnnnnnnnnnnnnnnnnnnnnnnnnnnnnnnnnnnnnnnnnnnnnnnnnnnnnnnnnnnnnnnnnnnnnnnnnnnnnnnnnnnnnnnnnnnnnnnnnnnnnnnnnnnnnnnnnnnnnnnnnnnnnnnnnnnnnnnnnnnnnnnnnnnnnnnnnnnnnnnnnnnnnnnnnnnnnnnnnnnnnnnnnnnnnnnnnnnnnnnnnnnnnnnnnnnnnnnnnnnnnnnnnnnnnnnnnnnnnnnnnnnnnnnnnnnnnnnnnnnnnnnnnnnnnnnnnnnnnnnnnnnnnnnnnnnnnnnnnnnnnnnnnnnnnnnnnnnnnnnnnnnnnnnnnnnnnnnnnnnnnnnnnnnnnnnnnnnnnnnnnnnnnnnnnnnnnnnnnnnnnnnnnnnnnnnnnnnnnnnnnnnnnnnnnnnnnnnnnnnnnnnnnnnnnnnnnnnnnnnnnnnnnnnnnnnnnnnnnnnnnnnnnnnnnnnnnnnnnnnnnnnnnnnnnnnnnnnnnnnnnnnnnnnnnnnnnnnnnnnnnnnnnnnnnnnnnnnnnnnnnnnnnnnnnnnnnnnnnnnnnnnnnnnnnnnnnnnnnnnnnnnnnnnnnnnnnnnnnnnnnnnnnnnnnnnnnnnnnnnnnnnnnnnnnnnnnnnnnnnnnnnnnnnnnnnnnnnnnnnnnnnnnnnnnnnnnnnnnnnnnnnnnnnnnnnnnnnnnnnnnnnnnnnnnnnnnnnnnnnnnnnnnnnnnnnnnnnnnnnnnnnnnnnnnnnnnnnnnnnnnnnnnnnnnnnnnnnnnnnnnnnnnnnnnnnnnnnnnnnnnnnnnnnnnnnnnnnnnnnnnnnnnnnnnnnnnnnnnnnnnnnnnnnnnnnnnnnnnnnnnnnnnnnnnnnnnnnnnnnnnnnnnnnnnnnnnnnnnnnnnnnnnnnnnnnnnnnnnnnnnnnnnnnnnnnnnnnnnnnnnnnnnnnnnnnnnnnnnnnnnnnnnnnnnnnnnnnnnnnnnnnnnnnnnnnnnnnnnnnnnnnnnnnnnnnnnnnnnnnnnnnnnnnnnnnnnnnnnnnnnnnnnnnnnnnnnnnnnnnnnnnnnnnnnnnnnnnnnnnnnnnnnnnnnnnnnnnnnnnnnnnnnnnnnnnnnnnnnnnnnnnnnnnnnnnnnnnnnnnnnnnnnnnnnnnnnnnnnnnnnnnnnnnnnnnnnnnnnnnnnnnnnnnnnnnnnnnnnnnnnnnnnnnnnnnnnnnnnnnnnnnnnnnnnnnnnnnnnnnnnnnnnnnnnnnnnnnnnnnnnnnnnnnnnnnnnnnnnnnnnnnnnnnnnnnnnnnnnnnnnnnnnnnnnnnnnnnnnnnnnnnnnnnnnnnnnnnnnnnnnnnnnnnnnnnnnnnnnnnnnnnnnnnnnnnnnnnnnnnnnnnnnnnnnnnnnnnnnnnnnnnnnnnnnnnnnnnnnnnnnnnnnnnnnnnnnnnnnnnnnnnnnnnnnnnnnnnnnnnnnnnnnnnnnnnnnnnnnnnnnnnnnnnnnnnnnnnnnnnnnnnnnnnnnnnnnnnnnnnnnnnngaattcaatggagtggactggagtgctgtggggtggagtggaatggagtgtagttgaatggagtggaatggaatgcgatggaatggagtggagttgagcagagtgaagtggaaaggtgtagaatggaatggaatggagtggagtggagtggactcgaattgagtggagtggaatggaatggagtggaatggcgtggagtggaatggagtggagtggagtttactggaatggagtggaatggagtggagtggattcgaatgaaaaggagtggagtggagtggaatggaatggagtggactggaatggaatggagtggagtggaatggagtagagtggagtgtaatggaatggaatgaaatggagtggaatggaatggaattgaatgcaatggagtggaatggcgaaatgaaatgtgagctgagattgtgcactgccctccagcctgggtgagagagtgagatcctgtcaaaagaaaacaaaggaatggaatggatttagaatggaatggaatgaaacggaatggaaaggaaggcagtggaaaggaatggggtgtaatgtagtggagtggaaatggagtggagtggagtggagtggaatggaatggaatcgaatcaaatggaatagaatcgaatcgaatggaatagaatcgaatggaatcgaatggaatacggagaactggaatggagtggagtggaatggagtggaagggaatggggtggaatggaattcaatggagtggagtggaatggaatcgaaaggaatggaatgggaaggaatggaattgaacggagtgcagtggagtggagtggaatggaatgcaaaggaatggaatggaatggaatggaatggaatggaatggaatggaatggaatgcaaaggaatggaatggaatggaatggaatggaatggaatggaatggaatggaatggtgaaatgaaatgtgagctgagattgtgcagtgcaatgcagcctgggtgacctagtgcgatcctgtcaaaagaaaggaatggaattcaatagatttaaaatagaatataatggaatagagtggagtggagtggattagcgtggagtggagtggagtggaatggaatgggaaggaatggaattgaacggagtggagtggaatgaaatgcaatggaatggaattgaatggaatggtgaaatgaaatgtaagctgagattgcgcactgcactccagcctgggtgacagagtgagatcctgtcgaaagaaaggaagggaattgaatgtatttagaatggaatataatggaatggatttagaatggaatggagtagattggagtggggtgcagtggaatggagtggagtggaatggagtgcagtggaatggcgtggagtggaatggagtgaagtggaatggagtgtagtggaatggagtggagtggaatggaatggaatggaatggaaaggaatggagtgaaaagaagtgaaatggagtgggatgcaatggcatggaatggagtcgagcggagtggagtggaatggagtggagtgcagtggaatggaattgagtggaatgtaatgtaatggaatgtagtggaatggaatataatggaagggaatgcgatggagtggagtggagtggaatggagtggagtggagtggaatggagtggagtgcaatggagtggaatggaatggaatggagtggattggaattgaatggaatggaatagaatggaatggaatggaatcgaatgaaatggaattgaacagcatcaaatggaattgaatggaatgtggtgaagtggagtggagtggagtggaagggagtggaatggaatggggtggaatgaaatttaatggaatggagtgaagtggagtggaatggagtggagtggaatggactgggaatgaatggaattgaatggagtggagtggagtggtgtggaatggaatgcaatggaatggaatggactggaatggtgaaatgatatgtgagctgagattgtgcactgcactccaacctggtgacagagtgagatcctgtcataagaaaggaatggaatggaatggatttacaatggaatgtaatggaatgaagtggagtggagtggagtggagtggaacggaatggtatggattgttatggaatggaatgcaatggagtggagtggagtgctgtggggtggagtggagtggagtggaatggagtggaatggaatgggatggaatggaatggagtggagtggagtggaaaggtgtagaatggaatggagtggactggaattgagtggagtggaatggaatggagtggaatggagtggagtggagtttagtggaatggagtggagtggattggaatgaatgggagtggagtggagtggggtggaatggagtggactggaatggaatggagtggagtggaatggagtggagtggagtggaatggaatggaatgcaatggagtgtaatgaaatggaatggaatgaaatggaatggaatggcatggaatggtgaaatgaaatatgagctgagattgtgcactgcactccagcctggatgagagtgtgagatcctgtcgaaagaaaggaatggaatgaaatggatttagaatggaatggaatgaaatggaatggaatggagtggaatggtatgaggtggaatggagtggagtgcagtggagtggagtggaatggagtggagtggaatggaatggaatggaatcgaatggaaccgaatctaatcgaatcaaatggaatcggatcgaatggaatcgaatggaatcaaatggaatcgaatggaaaaaatggaatcgaacggaattgaacggaatcgaatcaaatggaattgaatggaaaaaatggaatcgaatggaattgaatggaatcgaatcgaatggaatcgaatggcatcgaatggaatcaaatggaatgcgctgaagtggaatggagtggaatggaatggggtggaatggaattcaacggagtggagtggagtggaatggaatcaaatggaatggaatgggaaggaatggaattgaacggagtggagaggagtggaatggaatgcaatggaatgcaatggaatggaatggtgaaatgaaatgtgagctgagattgtgcagtgcagtgaagcctgggcgaactagtgagatcctgtaaaaagaaaggaatgaaattgaatggatttaaaatggaatgtaatggaatggagtggagtggagtggagtcgagtggaatggagtggagtggaatggaatgggaaggaatggaattgaacggagtggagtggagtggaatgaaatgcaatggaatggaatcgaatggaatggcaaaatgaaatgtgagctgagattgcgcactgcactccagcctgggtgacagagtgagatcctgttgaaagaaaggaagggaatggaatggatttagaatggaatataatggaatggatttagaatggaatgtaatggaatggagtagattggagtggagtggaatggagtggagtggagtggagtggaatggagtggagtggaatggagtgcggtggaatggaatggaatggagtgaaaagaagtgaaatggagtggggtggaatggcatggaatggagtcgagcggagtggagtggaatggagtggagtggagtggaaaggaattgagtggaatggaatggaatagagtggactggaatataatggaagggaatggaatggagtggagtggagtggagtggaatagagtggactggaattgaatggagtggagtggaatggagtggagtggagtggaatgtaatgaaatgcaatggagtggaatggaatggaatggaatggaatgcaatggaatgggatggcatggaatggtgaaatgaaatgtgagctgagattgtgcactgccctccagcctgggtgagagagtgagatcctgtcgaaagaaaggaatggaatggaacggatttagaatggaatggaatgaaatggaatggaatggaatggagtggactggaatggaatggaatggagtggaatggaatggagtggaatggaatggaatggagtggaatggaatggagtggaatggaatggggtggaatggagtggagtagaatggaatggaatcgaatgggatcaaatggaattgaatcgaatcgaatcaaatggagccgaatcaaatggaatcgaatggaaaaaaatggaatcgaatggaatcaaattgaatggaatcgaatggcatcaaatggaatcgaatggaatgtggtgaggtggaatggagtggaatggaatggggtggaatggaattcaatggagtggagtggagtggaatggaattgaatggaatggaatcggaagcaatggaattgaaaggagtggagtggagtggaatggaatggaatggaatgcaatggaatggaatggaatggaatgcaatggaatggaatggtgaaatgaaatgtgagctgagattgtgcagtgcagtgcagcctggttgatagagtgagatcctgttgaaagaaaggattggaatggaatggatttagaatggaatgtaatgtaatggagtggagtggagtggcgtggattggactggagtgcagtggaatggagtggtatggattgttatggaacggaatgtaatggagtggggtggaatggagtggactggaatggagtggaatggaatgggatggaatcgaatggagtggagtggagtggaaatgtatagaatggattggaatggaatggagttgactgaagtggagtggagttgagtggagtggaatggagtgtagtggaatggagtggaatggagtggagtggagtggagtggagtggagtggagtggaatggaatggaatggagtggagtgcagtggaatggagtggattggaatggaatggaatgaagtggaatggagtggagtggagtggaatggaatggagtggaatggaatggaatgcagtgaagtggagtgcagtggagtggaatgaagtggaatggaatggggtggaattgaattgaatagcgtggagtggagtgtagtggaatggagtgtagtggaatggagtgtagtggaatggaatttcgccatagataaaatctagtatttcagcctaccattgagtgtgcttatagctaaccaaaacggcactctgtctcgggaatacagatttgcctagaggtatcctattgcagtcaaagaaagagcaatgagggatagaaaaggttagtgatggagacaccaaagctgcattttacaaaaaacaatgtaaaaactttacggattggttctgctaccttactacagtttacattcctctcaggtggcagaattgttaagttttttcttaagatagaaaagcaattcagataatctgaaatctccacaggaaggataagaagcacaacagaaactattctaggcaggaagtcaatcctttcaactgtctgtgctccatagatacaattgtctgcactgggagtcatgtgcggtacagacaacagccagacctctgatcctctcatttgtgatttcagaagaaattaccagtcaactgagtaattcactgactaaagtatacatttggcactgaaagaggttagacggataactatttgtatcaccatattcatgaagctggaatattttcattactcatatcacatccgaatggaagattttaaaagctctctcatcttgtaagatggatatgaaagaacattttctgagaaatgaaattataaacacacctgtgaggtggatggaagagaaaaaaaaagaataatcagcttgagttcttctccttgataagacaactcactaaaaacatagagagaaaagtacaagtttaaaataattaaccagaagaagacagctctagagtttttaaatggctgataagattttagtctgctgcaagttgaaaataactatattgcttgtgttttaaggtacataatgagcaattatatcacacatgataggttcagctgtaaaatattatccgttcacagctggtactcataaaagcatagcacaatggaagatggaatttgctaaaataaaccatcttctgaaaactactattctgtaaatttaaaaacaaagtttatatgttatttgtcttatttaataggtctgtgaaaaaaatgagatatttgaaaagtaagtgctaccttaattagttctttatattagacagctggttacagtaatgcacagtaaggtgctacatacaaatattgctaaattttctgcatatactatgtatttagcttaaattatttgaaattttataaagtaacaaatgtatatttaaatgttttgacacaaattgcaaatatacctttaaaaagcgtcttacactctaaatattatttgtcacctatatatttatattttctctataggaaagtttaaatttttcccttgaagctttaattatttcagtctataaaacaaactgataatgttcaaattaacagaaaaaaaggtttacagatatgtgcacaagtatgcacttggagtttacataatatatataaatatatatacaaatatttgtatattataaatagatatacaaatatatactatatatataaaaactccaggaaaggcaaggtagtcaacacgcctatgctgtcttgaggttacagaaaacacagacctgtacgttggtgaatcagtctttgcggaagacaagtgacgacaaggaagacagaggagcctggcagcagaggtggttttgttacacggatgaaacctcacagggagcagccctcttcttgggaagtatagataggaaatggtttttagaaatgtaaacgtgccagactcagttaatctttcctaaacacagacaagggagtatctcagggaaagcctgtctatatcaatgcagattttctctacaaatgcaaatctccccaacaaacacagcttttcagctattcttgtagaagaagctatctccagtcttccgagtagccatcttgaaatatatcaaaaagttggccaggcgcacccctgtaatcccagcattttccgaggctgaagtgggtagaacacctgaagtcaggagttcgagaccagcctgaccaacatggtgaaaccccgtctctactaaatacaaaaattagccgagagtggtggcgcatgcctgcaatctcagctacttggaaggctgagctaggagaattacttgaccctgggaggctgaggttgcaatgagccaagattgtgccattgcactccagcctgggcaataaaagcaaaactccatctcaaaaaaaaaagtattttagggtaatattttgtgtatctttacctccatatgtacaataaatattattgtgatttttaatctttactcttctgtggagaaaacacaggtgtgatttctagtgtagctgaacatcacatttatttgacaatactgcacttgtgtgtgtgtgtgtgtgtgtgtgtagctactctttacctttgttctcacttaatgattagatattaacaattaattcagtaacatgtatgttttgcaatttctccatgttatgctttaaattagattaatcatgcccctataatgtgtacattttaacctttgactataggtctcaatcttactttggctcctgtatttgaatttatgctattaaagtcctacagctaaaaaggattatatagacttatctatatttttactagtattctggtgtcattttaaattatgtaatgaaatcaaattttaatttggattattgttatctgagttaaggatctaaatttttaattttcttatagatgttacataactgtttctgaaccatatattgactaatctgctctttatatgatgtgcattataagagcttgggatttattcatttgcaaagatgaatgcttgagaagtagatatttaatcataacatttcaaaatctactggataacctagaattgaaaaatagcctataggttgaaaaactcctgtagtgaagaaagaaaataactaatataaagtgacaatataaatattataagtatttattttattatcgccctgaaatttgataatacaaacatgtaatatctacatatcatccttatatcaggtcataaaaaatcaatacattcttcaaaaatttagcataacagaaaatgcactctctccttgatggaattaagttacaaataaaagtaaaaataagtagataagtagatggaggtagatgtttaaaaacaaagaaaaatatttgttttgtataacataaaaactcaattgacaattacaatatttcaagaactttggctgtcaaccggtggagagttttccccaggagacatttgtcaatgtctagggttattgtggggatgtcaagactggtggaggtgtgaaatatagaggtcaaacgaatcacctagcgttgctaggggagcctcccaaaacaaagaatcctctggtcctaaaggtaagtacaccaaggttgagaaaccataatatagaaagcaaacactatgtagctattccaagtgctcaggaaaacacatcagtgccctcgtggggaaaagtgtaaacattttaattgctgtacatggtgacacaaatgcatgttgttaatctaagtggaagaggctgaagcacaaaacgcaattcaaagagtttacttgagccaaaatgaggacagctgcctggaagaaacagacccaagtatccttggatatgaactccatttggagctttgcaacaagcagtttcttaaaggcaaaaaagggataagaagtgggatgatgcaaagaggtttgtcacaaattctcattggcttatggaaataacatttattagtgactgttacactattattgggtgtggattgtagtgtctggtgtggcatcattggttaatttatagctactgtggcaacagcaagcagcctagatgaacacacagctcaaagaggagcaggacagaactgctgtctcatttgaataactctctgggcctgattatttcaaaggacttgcgtttctcacatgaaagttattttcttttctcaatttcaataaatgagaataaatagacgtaaaatagatcttttcgaggatgaagtaaatggaataaaaaacaaaacccaagctgaccagaaatcatagagggaagaaaaaggttataaagatatggatttttcaaagtgattttaagttattaggaatcagttaaatgttgggggattttgtctgagtataggctaaaggagaatgtcccttttgccttctgaagtttccctgaaaatcactaataagaggcagataaatagtagaaaaggcatacaggattctgcaatgtgtgtacactggagcccttagaatggagacccagacacaagatgggtgcagaagcttatctaccacatgaagtttacagaaagaatggggtcttggatcacagggaaaaaaaagaggttatgtgagaaaaggaccctgactagcaacagtggacttattacgtgggtgaaacctcgctgggagcagtcctcagagagaatagagagaaaatgtttctttcagacctttggagacctcagacgctcagctaacctttcccagatccagacaagttagcagacctcagagaaagcctggctgcatcaaagtagattctctacagatgcaaatctccccaagacagctttgcagctaagtttgcatttccagcccttctgaatagccattttgaaatatatcaaggaaatatatttcggggtaaaatacattggattccttcatacagctataaaacatacagaaataatttttgtcaatgtctactacaaatccaatatagcagtaattataaaacccaccagatattgaagaaaaaatatgtagagtacatcacttacaaatattgatactaaaatgccaaataaaataaaaataatatccaacaatatttgaaacagtaagacaagaaattggcaaaaataaaaacaaatatccaccttggggatgaaagtgtgattccaaatttggtgatccaataatattaataatcatattgattaccccaaataaacaataaataggggattctcagtacatgctaaaatatatttgttaaaaggtaatattcatgtctttaaagattttaaatgctataaagagtctgatattctatatgcaaacatgtatatgtctattagaagaagagaggcttgattttcatatgttactacatagagatagagaagtggatagattaatttgcatattcatagagaaagcataaaatagcaatttactatcatacttaaaggaatttaaattcaacaataaaataattcaaaagtaaaattttaaatatttttaacagttacattcttattagataatataataattgtgaaaatattcagtgctaaaataagatagaatgtctaaatctcagtattaaaactagtataaatatttgcttgtttatacaaggaaaattcaagctcaacctaaaattatataggaaatataagaaaaattttaagggagctctttaataacacaaacatatatatatatatacacacacatataacatgtatatatgttatatgggatagatatagatttaacatgttatatctatatttgtatctatctatgactacagctgtatgtatctacatttctatatacttactcagtgatataaatataggctggaataaatataaagccacatatgattcttcgataaaaaggatttagtatcataaagacaaattctttccaaaatcacctatgaattcacaacaatatacagtttcattagtataatttaaaatttttaaataaattccaagattcatttaaggaaatatacacgtataccagcagcaaagaaagaagtaagagtgcactcaactaacttgctattaaaatacatttttaaacttagtaactaaaactgagaagtactgatttggagtacgggaatttaggtatatgggatctcaaaagcatagagctcaaaggagacccctgtatgcacgagagcttaggacgtgctttagaaggcattaccaaaccacgggcaaagttactttagtgtcttagtcttactaggtttgaaaagccagagaaaagactcaaggccaccatataagagcaaaacaaaaggacagggagagaatgtgaagatactgaaacattttacataaagtagtataaaacatactttaaagaaaatgtaaagtttaggatatacatcaaaaccagcaaaaccactaaataaacaaataggcattgtaaagtagcaagagaaaatttaaatggatttctaaaaagtattgacacctatgatttttaaaatatgtttaagaaatcccgtatttcacagggcagcctttcacaatatagatatattaggacataaaggtccttctgtttttaatttactagtgtttatagggttaaaattgtcttctacccttgtcttttgtctgatggtgcacaaaattttcataagcatgtatttctgaatgcctgatggattgacatatataatatgctgctagtattaaaatatgtgacagaaaacacatccaaacttcttactgtttgcataaattctaggtttctcctatttacctcaagcacgtatggagcgaattcttaccttttaatattgccatggcattcacattgaatgtaagttgaactctctcatatggtagctgggttcagattcccttgacaatttccagttctaaccctcacagttcctcagtgtggctggcccagatattgaccctacacagttgcctcctcctggtgactacccgctatggaaccattggatacaacctacctgactcaccccacagacctcacagcccacatggacagctcccaaacgccagagtgacctgctcagttgcagcaggagccaagaaatatgcctgctggcactcaccccactgactatagccccgtggaaatcttatttgggttatgttctgggcccaataaaggctggagtcccacagaccccttttctctctcttgctccccactcgtcttccccattttgttcagccctatgaggtgtgctactgtattagtccattttcacaccaccagtaaagacatgcccaagactgggtaatttccagaagaaagaggtttaatagacgcacagttccacatggctgggtaggcctcacaatcatggcggaaggtgaaaggcaggtctcacatggcagcagacaagacaagagagcttgtgcaggggaactcccctttataaaaccatcagatcttgtgagacttattcactatcagaagaacagcatgggaaagacctgccctcatgattcaattacctccaacctgttccctcccacaacatgtgggaattcaacatgagatttggctggggacacagctaaaccctcttctcagctaccctcttctctctggatctgtgagtaataaaaccacttctgtgatttcccatgtttggtcctgtggcctcaatgtgtctgagctgacctacactggaacctaactctcctcctggccagggtctctgagagtggctcttgtcagaaatacacaggacacaggtcaggcaacagtcaccaggcatctcctagtctcaacagatgttctgtgagagggaggcctggtcgtggaatgcacacctggccactgctggggtaaggaagtgtcctgtgaaaggcacatgttaagcatccacaaccccctgcccagaaccccagaaaggcagggctccagttgacagccactctccagagacaaacctcaagccctaactggaggaaaagaaaacaatgtaaaaagttgaatttatcttactatttcaatgatccagtaaagacattctatgcctgcacaccacatattttctttgattgtggatatattttagataaaattttatatctggctttcactttagcctggtccctatctcaagcataaggtaaagattttccatgggttcttttctggtactactacctgccagtgtgggctcatgtcctagtctatcttgagggaatccccctattcattattgtcaaagtgagactgttaagtcttgatttccctggacaactacattgcatgacttttaatatgatttttaaatataccctttactggacaataaattatataggtatctgagtaagagatatggtcaggaagaggcattgcctcattcagcttttctgtttggtgaacttgcatatgttctcctcacccaccagtcacctctaaaccatattgttccaagacaacaaacagaactcaagtgtgtatctttcaccactggatttgtatttgctccataaatcttaatgcttaatagggtttctgttagcattttctctatctattttcccataaaatatcacaggccttcttcatatggaattatgggtgatttccttcaatctgcatcatatcaagttgaggttcatgttgatggaaagtaaaacatacgtataaaatatcagtaatgatgttttcccctcctttttagcacatgtgcttgtgagagtcattgtaatacaattctagtctcatgctttgatcatccctaagatgaaaataacatttttagataaaatatctgagttttatgaggccttttgtatatgatgtgatagaatatcagaagaccatacttttttctagttttccatgcaattctatcgtttcatctttactcctaccagagtaattttccagagtagatatcttgtcattcttcctgttgttatcagtaaataagtgaaatgaaaagctagattatataatttatctagaacaagaaagtagaattgaatctatatacattaatgagactaagcagtcaattacacagataggcattttacattttgaagatcatatggacccattgtcagatatattagtatttatgtctacatggacatcacctgtgcatatttatgtagaaatcaataagagctgatttttatttttattatatatattttttgagatagggtcttgctttgttgcccaggctggggtgcagtggtgcaatcactgctcactgtagattcaacctcccaagctcaagcaatccttccaccttggcctcccaaattgctaggacaacaggtgcacatcactatgcccaccttttttttttaacttttgatagagactgggtcttgccatgttgcccaggtttctcttgaactccttgaactcctgggctcaaggaatcctctcatttcagcctcttcaactgctggtattacaagcatgagccaccatatgggctggaagctgatttttaaaatactgagatcatatagatgacagcacctgaaaaatagacaacaccaagctttatgttaaaaggtgtgagggtatcaatattgttgtggctattggggaggaaaacattagtaaaaccagtgagttaaagctgttgctttaaactttggctttaattcaacaaatgttctctgtggtgatagtatgtatgtaaccatgctatgcccattcactgatgcagtagagggaagaatttctcaaagacaactgttctaagattgaaattaaaccgtactgggtttgaaaagagaaagtccaggacttaccaaatattttagatatcagataaaagcgaatggtaggtatgcgatgataatcagcaatggttgttcacacaatatatcaaatcagtatttcaattagcttttgaattacaaggacaaatggatcaagtcttgactctttagtagataaatcttattaggctgagatgtgttttcacctgtttttccacaaggagattgcaaatttgcaaacctcagctgctttcattttatgctctcaccaatgcaaaagctgaagttcatcaatcagtgtgtctaagtgttcactagttatataccattttgtagtttaggctatctttccaacttcctaaatcatcaccttcatttgaccttgtttttttccactatcacttctttgttgaccatataaaaaatacaagtaagttcttatttcgttattgttcattttagtctaatctcatcaaaatatcataattctttaatttcattttaatttcaaagatgaaatgaaacctacatagaaaagagtgtaagattgcatttgcgttattttggcatcaatttgctatcctccctcatacacagagatcatttccatgtactggatttcaaacatccaagtgcagtattaaaagcagttgtaaattatggttctcattttcatgatacaattactatataaacttcctcttgctgctgtaacaaattatcacgaaattcatatcttacaataaagtgactgttaagcctacagttctggagttcagaagccttaaatgagactcacagggctaacatcaagttttgggcagagctgcagtctttctgagggctctgtggcagagtctatgtactttatttttttcagcatgcagaggccacctttattccttggaacatgacctcattctttttcttttttttttttttttttttgagatagagtctccttctgtcacccaggctggagtgcagtggcaagatctcagctcactgcaacctctgtctcccgggttcaagcgattctcctgcctcagcttcctgagtagcttggactacaggcatgtgccaccatgcccagttaattttttgtacttttagtagggatggggtttcaccaggttagccaggatggtctcgatctcctgacctcgtgatccacccaccccagcctcccaaagggctgggattacgcttgagccaccaagctgggtccttgttcttgtatcttaaaagtcagtgatgttgagtaatttcttacgccaccacctccatggttgcctttcttctgccttcttctttcacttataaggaagcttgtgatttcattgatcccaatcatttaagataatctctccatcattttattgcaaccttaatttcacttgaaatctaattttcctctgccatgtaacctaacatatttgtaggctagactctgggaattaggacatgaacatttttgggaggccatctttttgtctacagcagacataatctatttactggcagattaaagtgttctttatttttcttcatccctgtcttaattttttttaaataatatgaattgtagtaaagagaaagaaagaaaaggaaagaaagaaagtaaaaaggaggaaagaagaaagaaagaaagaaagaaagaaagaaagaaagaaagaagaaagaaaagaaggaggaaatgagagaaggaagggagggagggaggaagggataaaggcaggaagggagacaaaagaaagaaagaacagaaagaaagaaagaaagaaagaaagaaagaaagaaagaagaaagagacagagagagaaagaaagtgagaaagaaagaaaggaaggaggaagggaggaaggaaaggaggaagagagaatggtaaaagggaggaaggcaaagaaagaaaataaagaggaaaaggaaggaaggaaggaaggaaaaatgaggaaaggaagggaggctggaaggaagaaaaggagggagggaggatgggagaaaaaggaaagaaagcaaggaagtgagaaagaaagaataagagaaaagaaggaagaaaagaagggagggacaaaggaagggagggaggagggaaggaagaatcagaggaaaggaagcaaagaaggaaggaagaaaaaaagaaaaagaaaggaaaagaaaaagaaaagaaagaggaaaagaagaaaggaaggaagaagggaagggaagagaagagaaaggaagatggagagaaggaaggaagaccgcaaacattagaaattctgggtttgttagagaatatgccataccgttttttttttcacttgaaaggaaagagtacctgccattgaagattggatgtcttgttggtgatattgttcttatcttccatatgattactgagtttgtgcctagtctgtcccttactaagacaaaagttttgaagtctgcaaatataattttggatttttctagttcacctttgatttctttcttgttttacctcatgtatttggaggttctgttgttagctgcataccctaattagtaggatgtttacatcttcttgagaattgattattatattatctattatctctcatctctgatactatttcttgttctgaactctgttgtgtctaatatcaatgtagtccttccacagctttattttagtgtttccatgatatggctttctccatatcttgatgataacctatttatatctctatatatttggagcaagatataaaatttagagttgattttttaaagattttccaagatgtaattcttatttatttttgttctatttgagattctctgagtttcctatatctgaagtttgattttctgtcacttcttttagaatatttttggcagttattttgaaaaatatttcttttgctccagtattttttcctcttttctttttgggatttcaattataactagggtaggtaatttcatctcagtcttatgcaggtactttttctcaggatctcaggaatgtagacttctcacacttctgttcttttcctggctgtgttggtgagctcagtgatattcctccttcaccttcaagagcagttttgttttgtttttcctgttttcatacttccagcatcaggagtattctagttgtgtcagtttttgttaccttcccctacatattaagtggaatatcttggtctatttggactcttataacaaaataacatgaactgggtgactaaaaaacaacagatattacttttttcacacttcttgaggctgtaagatctcaggtcaagatgctcacaaattcagtgttgatgagagcccatttcatggttcatagatggtgccttctttctatgtcctcacatagtggaaggcacacaagaactccattgagcttcttttaaaaaggcactaatcccattcataagggctcggcccccaagagctggtcacctcccaagtgttctgctctccctgatctgtatcatatacagactctcttggattccttaccaattgcttgagagatcgcagtgggtttgtagggaaaaagttttcacgatgatggatctttcccaacttctgcagctgtcagccgtctcccaatctgaccagccccactttgtccttaggaatatattggttattccagctttacttgtcatagtggtgtctatttgcatccgtcctatgtaagtgcatctgtcctctttcgccttgcagatgcttgctttccctcacattttgactcagttcttggcaacctggttgctataaaaataaaggcatgactttgaagttagtttggttattacattgttgtaaggttaggagccctattccatcccagctctgcaaaacccagaatttttggggggttgaaattttaggctttctctttgaattgtagttttatcttatttcagttacaatttgcattatcataatgattaatgagactaagctttttttgtgtagtcgactgtacctttggatttttttcccaaatcccttttcatttcttattttctttatggtttcagaaaatgtagtttacataattgcagattgattttttaatcagttaatggcatgcttaatggagagaaaaaatattaactatatttccctttttaattactgtgcctttttcttttttaaggaaatatttcattacgttaaattttagtgttattctacttagctattccttaagtattatagtattttggatttcacatataaatttataacacatcttgagttttttgtatatagagtaaggctattttctcttttttgttttttaacgcaaaaatcacataatataaaattaataacttaaccattttaaaacatacaatgcaattgcttttagtatattcacaatgttccagggcaatttcatcatgtcctttccaaaaacccattatgcataaagttgttacaccctattctgcttccctgagccctaatgaccactaatctgatttatatcccaattgatttgccgattcctgatatttcatgtgaataaaatcaagtaatatttgtccttctgtgaacttaacataatgctttcaaatttcacccatattataccatgtataagtacttcattctttgttatagctggaaattgggtgtccatttatgagtcaacaagcatagggattgtttccactttttgactgtatgaatattactgctgtaaatattcatgcacatgtttattgtttgagcacctatgctttttaagagtaacagctgacttaacagaaacaatggaaggcaagaggcagtagaataatatagtcaaaatatgcaaaggaaaaaaaaactgtcacccaccaattccttatccagcaattatttttcaaaaatgaagataacacaaagacttacccagataaacagaaatattaactgaagttgttgctggcagacctaccatattaaaaaaaaaaaaaaaaactaaaataaattcctaaggctaaaagcaagttacacaagactgtcatttgaatccacatttttaaaaaagcactggtataggtaatattaacattataaaagacagtataaatgcaagttttctctttatcataaattgtttataaaataatatgtgtataacggccgggcacgatgtctcatgcctgtaatctcagcactttgggaggctgaggcgggtgtattacgaggccagaagatcgagaccatcctggctaacacagtgaaaccccgtctctactaaaaatacaaaaaattagccgggcgtgatgacggacgcctgtaatcccagctactcagaaggctgaagcagaagaattcatgaagccgggagatggagtttgcagtgagcggagattgtgccagtgcactccagcctgggagacagagggagactccgtctcaatgataataataataatatgtggataatgtattgctgaatatttgacatgtagaaatgtaacatgtctataacatattttccagtagcatcaaaaaggaggtagttggaagaaaaatgtattgttaaggtaatccctctggatggtaaagtaataattactaaaatgtattgttggctttgtaactttaatagatgtaatgtgtaaagtgataatactttaaaatggaggaaataaaagagatttgtaaaagaatgatgtttctatgtattactaaaagtttactagtataaattggaagacgatttgaataattaattttccatatacttatatggtaaacttacaacaacaacaaaaattctcaaaaatatatagtaaaataattcattagcaatctaaagttccctgttttggaaaatattcactcattgcaaaataaagcaacaaagaaaaatatttgggaaatatacaaaacaaacggtaaaaaggcagacataaatagaattataccaattataatattaaatgtgagcagattaaagtccaatcaagaggcagagattgtcagactggattaaaacaagtgatcccaatatacactgagatgcaaggatactaatggattgaaagtaaaaagatgacaaaaaatatcatgcaaagagcaatcataagaacactgaactcattatactcataacacatgatacagactattaaaaatgtgaatagtattttaaaaatttatattgtagtaataagggggtcaacgcttttggaagacatagctattacaatcatgtatgcacagataggagctaaattgtttcctctatatagatgctgaaatcctaaccactgaatatgacctcattaggaaataggttctttgcaggtgatcaagttaagataaaatcagatgagcctgaattcaatatgactgatgtccttataaaaagaagaaatttgagtagagggagacatacacacagggagggtaccatgtgattatgagggcagagattagccaaggaatgccaaagactgccactaaaccaccagaatctagaaacaaggcatagaaccgactttctctcatagcccttgaagggaccatccctgctgatacctcaatctcagactttcagcttccaggactataagactataaatgtatgttgttcaaggcacccagtttgtgttacttggttatggcagccctagaaaactaatacatgagctaataacaaagcataataacatgaagcaaaaattgacaaaagaggagcatcagcaaaatggcagtggagacagctgcaatctttcatttccccacagaaacatcacacaactaagagaaactgtctgaataaacttttccaaaactctggaaaatggtcaaaagattacaacaaccaagtgaaagcacactcaagaaaaagacaacttgaaaactttatgacatttttaacttgcctttgccccagcaaattggcagttttgaagtgtcagaagcccacgttcccagtgaggaaccctggtccatggttcaaaggaacaagagaagatcttacccacaaattattatgtatctgttctgactggtctgggggatacctaaaggactaatgaaaggttttttttttttttttctgtgttgctagaatacagaagagataaggaatggacattattaagaaactctgcaaggagacctaacaaaccacagatgcttagggcaaaaattagagtttacacatatagtagatcaccttcagcacaggaagaaaagttggagaagagtatttggaaaactaagacattcaaaatcattcacggacatgggagtgtctagaaattcacatgtatgcataggtttagccacatgctgacaaatgtcataagaagaccctacacgtttaccttggctgatccctcccctcagtgcaagctctgtgcaagtgtgaacttgaacttcactcagtgcaagagtgaacacacactttgtgccggcattaaagaacccagcacaaagccagtctgcatggcctagaaacatattttgctggataatgattccttgtttttctttttttgttgtatttgcctgtttgcttagttcctgacatacaataaaatcactgtcaaaacattagcttaacatttgttaaggaaacaaaaagacttcagtgaccacaccttataaagcaaacagttttgtaaatcactttggaaaatttcactaaaaattaaaaccttaacaataataagtaaataaaacttaaaaccacaaaacattagtgtgtttgtggggggggtctgatttacagagtaaccacatagtaattataattattataatgtccagttttcaaaaagttacaaggcatacaaagaatgggaaagtatggctcattcaaaggaacaaaataaattgacagaaaatatctctaaggaaacccagacatcaaacttactagacaaagactttaaaacaactctcttaattatactcaaatgtcaaaaggaaaacagaaacaaagaaataaaggaatcagaaaaaatattaaaaagtagaactatcaacaaagagataacagaaattctggagtggaaaacaacaatgataaaaatttaaaaattaccagaaggatttaagagtatattcacacacacagaagaagtcatgagcttgaagataagaaaatggaaaatattcactctgagaaacagataaaaaatgagcagagactaaggaatctgtgggacatcatcaaatagaccaacattcatattctagaaagttaaattatgttgttaaaaactttaccattctttctttttacctttctttcttcctccctccccctcctctttacttttcatcctcttcctttctcttatttctctccttcattatccctttcattctgtttctctttctccctttctcttttttctttcaattttctcaattactaagagatgtttaaatacccttaccatgttagtacatatggttatttatccctttagttctcttttgagatttatagtcactctaagtaaagagataacccaaacataagccccacaaacaggcttccataccattcttaatttggtcctgtaattctttgttgctgtattaactttctgatgcttttaaggatgttttataacaaattgtttagttttttccaatggaatgtttattctgaattatctaattcatattgtaagtatatagggagtttaatataaaattattaaactaatatttgtgaaagaatgtatttgtgcatttaacaaatatgttaatcctcaaactgttattgggcagctgagcatacagcaatgaaaataacataatttttatgtgtacaatatttatggaatacgttactggaacaaataaataatttagttaataacatgacaaagaacagaaatggtatacactacagagcacagtaatggaataatgaatgattaaagttattaatattaggtagaaaatgaagggtatctttgagagcagatctcagggagaaagcaattcaccttatgaggaaagagttacctgtggataaaggagaatctgaaaaatttacaagtcaagactttttgagcaaaaacaaaaatatgactattaggcaccaattcagtacagtgaaaaaaaagttgaagagatatcttggaagtaaaccatgttgtggaagagcatgtagggttttgataatcatgggatgattcttaattaattttaaatgcgataggaatatatgagataatttcaccagagaataacatgattgtgtttgcatttcaaaggggtgtatctggtgcactgtgtagaataagtaggtcatgtgagcaaataaattgggaggctactgtaatccagagaaaaaaggtagtgacttaggtgagaatgctgttagtatgagtggtattagtggtgagaagtcgttaggccatggatgtatttcataggactggccaagagaactgcagctaaattggagtgtagggagtgaaatggagaactcaaagatgaccctcagcactggaaggtgacagctgtcactgaagcatgctgatgcctcttattaagagagttacttgggaatggcaagatcaaaacttctcactttcaaatttatgaaaaatattgttttcagaacaaatgactttgggatcagaaagccatcattctaattgatggctccatgactacacaggctcacactcccaagaacaaaatcatcacaaaggtgcttcctgataattctagagaatggagaattactgtaacatctttctgattttaggagaggtagcagttccctttttagcctaaatgctattttttttaaagctcaggcaagagactccattataattttcaaatgtgtataacttaacttctcatattaaataccattatgcttaaattagtcaaaacattttccccatctacaactctatcttttcattgcaatcattttcacaaaagtgactgcagctaacagaccctaaaaggggaaaatctagggtaggttatctgatctagttagttttgaagacaggatctagagattatttaatatgaaataggtcacctgaaatgaagtgtttactgaaaacagcttggatcagcccagttttctaccactgaaccatgcatttggtttaaaaaacacaacaactctggggaatattggctgcttccaactgtattgaaggtgttaaagaaaagagcataaaattataaatgatcatctgaggcctttatagtctctgctcaagagactagagtcttccattcttaatgaaacacccaaatatcttcataattaggcaaattctaaatatcagagagataattttatcttgaagattgttaaattataatggtgattcactaccttgccaagtctctgagtcaaaaattagatctttgtttaggaattgatggtactttgcaacttggaaataggaagattttagaagactcaaacattgactttcttgtgtgcaaaaaaaagacgtattgagataagacaagtctttccttgcaaggatacccctaatgctcatacaccacctcccctaacgttaatatagcttccagatcactaaccagtgtcagagagcagcctatgcaactacaaattcaaaagatgttgaacacagggtcaagcctagaataaggagtcttagctaatttagtatgcttttttcccgaaattcatattaacaaaaacttggatatgtcagagaatgcattctaagttcactcaacctaggagggagaaacataattttaaattaagagctgaagcaatcttgtcctaacaaaaagcaaggaaaacgaaatatcaccccacaggaaggatttcacaaattagtgtcaacatcaaaaccttaaaataggcaaggaaaatggagattcacaattaactcttctacttgttttgttcagagaatagatggttctgagagaatgacagtgaattaaccccagctggtttagttggtgctttcaattgctgcttctgataaactcctttagctagaataaattgatgaggattttggcatgtggtattagagatggttattaattttgtcctcttatttgcattgttcaatgtagtaaatactagctgtatttggctacttaatttcaaattaattacaatgaaatatacttaaatattgaattttttagtaactgttggttcattattgaatatcttcagctaagatttcccatctaaagacactaagaggtggcttagttaactggtcgtccacaaatattgatgctgttgttaactcctgatatattctctgcaaatagaatattcatgagcctcctcctgaaaccagcagcctagagataattttataaattggacacaagttggaaatctatactctttaagtttttgaaatattagcttcccagggaagaaaatcaaattcataagatatgttaggacaatttaactcaagatgttcaaaactgaaatgacatattctataatatgtgataaaaccaccccctaacaacttaaagcaaaacagggattgaccttaaagacctgccttttcctcatcccccagccaatcagttttcaaatcttgcattttattttgaaaagtccttatccccttagtctcttgtttctagacttggcacatatttaagtttgttacctctatctattgactttcctctcttcaaacagtatctatgcctgccaaatgtgaacatacaaaaaacaaatcagaatgtgccattctgatttaaactgcttattagttaataccctcaagataacatctgggttcttagctgcactaagttaagcctatttacatctttttttgtcttcgactgcacttttcctatcacatcacactccagcaatgccaagctgtgccgccttctaccccatttccactattttgcccccgccgccgaggctttttgcccccgccgccgcagctttctcccaccgtggcttttgcccccgccgacgcagctttctcctactgcgcctttttgtccctgctgccgcggctttttgccgccgcggctttttcccccaccgccgcggctttttatggctttcttccccccaccgccgcggctttttgccccctgccgtcgcggccttttgcccccgccgcgaccttttgcccccgccgccacagattttggccgccgcggctttttgccccctcccccacggcttttgcctacgcggcttcttgcccccgccgccgcgggttttttcccccggccgcggctttttgcccccgccgccgaggctttttgcgaccttttgctccccccaccggggctttttacctccgtcgccgcggcattttaccccaccaccgcggctttctgctcccgccgccgcggctttttgcccccgccgccgcagctttttgcagctttttgcccctgccgcctcggctttttgtggttttctgcgtgcgccgccgcggctttttgcccccgtcgccgcggctttttgccggcgccgccgcggctttttgcccctgccaccgccgcggcttttgcggccttttgccccccgcctcagcggctttctgccaccgcgtctttttgcccccgccaccgcggctttctcccactgcggttttttgcccccgccgccgcgtctttttgcctccgccgcgcagatttttgcccccgacgctgcgcctttttcccgccctggcggggtcagcactgaggggtgctcctggtccagctctccaggctcgggggttccttgcctaggcgcccaagccccctgcctgggccgctgcggcttgcatagagcggccctgcgcgcagcggcgatgggagaaaagaaggagggcggtggcgggggtgatgccgccgggtccagccctctcatcttgtaggtgaggaaaccgaaggcctgagggagaactgacttgccaggaacccctgttaaggagaattaacaaagtgtgattattaaaggagcactgacttgggagtgagacctggaggcccacacccttggttaagacattataccaccttgagtctggcctgttgactgagggtgagccactctatcctcatctgattgtggggtcttgacctcaaggggtttcctgcaggaagaagcaaatgggtttgctttcctagctctgtccagtaccttagggaccctgagaactggagagattcttggagagccatctggtgtatgtcatgggtgggcctttcttgaaggtcagtctgcccagtggtctggctcagccccaatgaactgtcttgaatcattggagttgtctgtgtacttttaagggcttcttatccttgcaccaaaagatcccctggaaattaggtggtaaaaccttaacttttgtggggccttgtgtttgtcttaaaagttcatgcacatagccaggtgtggtggttcacacctgttatcctgtcctggatcctttgagtcaaggtgttgagaccaacctggacaatatagtgagaccccgtctctacaaaaaataaaatattaggcaggggtggttgcgcgcatctgtaatcccagctactactgtggctgaggcgggaggagcacttgagactgcactgagctgtgatctcaccagtgtactccagcctgggccacagagcaagaccttgactcaaaaaaaaaaaaaaaccaacaagaaaaattcttgaagattttgcattctgtgccactatccattggttttcatgtcaagataatgtcagaaattctttacaattgcttccagaaggagtagacttttgatctagtgcacaggtgtccagtcttttggcttctcagggccacattggaagaagaatgctcctgggccacacataaaatacactaatgctaacaacagctgatgagcttaaaaaaaaaaaaggtttgtgcataattttcatgatacccaccaccacagataggcggaaaagtccttgtagtcaaagggttggacacggctgatctagtagtgtcttgtcatccgttttggctttctccctgattccagaatgcaggtagagatgtagagacatgctctcaggacagctgttgagataaaaaaaaatcgttgtcatttattcccaagcacagctgtttgtcatttgcattgaaaaagtctccattgaaactgctgtcacatataaaatctatttatataagtctgtatttttctgttgtcttggcctttgtgggcagtagtgtgttttaactgagcaaactgtccttccaagtaatgaagcaggtaggcaatcagcctacctgcttgccatttttgttccccttccatttttctaacctcaggataattgtaagaatgaagtaagatttgtgtttaaggccaggcacagtgtctcaggcctgtaatctcagcactttgggaggcagagatggatgtatcacttgagctcaggagttcaagaccagcctgggcaagatactgagactccgtcttgtataattaaattaaaatttaaaaaaagaagagagaaagacctgtttaaaatttaaaaaaaggggggaaagtgtaatgcaaaatgtggactatgccagctgtgattgggaaaaataatttttcctacagcattatctgtagacttgtattagcagcatactggtcataagcgttttgctttcttcaaatatgatgaggtaagctactttaaagtgtggtggggctttcctccgcgtggctcctggaggtgttgagtcccaatttagccaattaattcgggtttagttttgatatggataagggagaccagcttcattcatggtgcacacacagttttgccaataaggaaaaaaaaaagccacctgaatgttcctactcattagatgctatctggagagctcctaccccaccgccaccaaggcccgggccctaaaaaagactcaatgcagcctttctgtatctcatactgtattctgcaagatgctcctgtgaaagaaagttgtgctgcatcagccatctccctcctgaagatccttgcgaatgaggatttgtgttttaaaggttctgagaagtcctgcaccaacagttctcaaacttatttgtccagaggatcttttcttccactgaaagtagctggggagacacggccttaagccttgagcagagaaagagacaagaaactgttgtctcacttacaaccaagtgttgtgtttatgttttaggtttttatgaaactgaggtactgtttgaggttctaaatcaaactgggtggttgaagagagcctggtatccctgtagacttagccagccatgagaggttgccttttgttgaaggaggtgttttacaaagggaaatagggtgtctcctgggcatcgcattagcacttaaatacatgtatcactgaaatgaaatgaactgatgaaatgatgaaatgaaatgaaatgatggaatgaaatgaaatgatgagatgaaatcatgaaataatgaagtgaaaggatgaaatgatgagatgaaatgaaatgatgaagtgatgaaaagatgaaatggaatgatgaaatgaaatgaggaaatgatgaaatgcaatggtgaaatgagggaatgatgaaatgcaatggtgaaatgaaatgaggaaatgaaatgaaatgaagaaatgaaatgaagtgaaatgatgaaatgaaattaaatgatgaaatgaaatgaaaagatcaaatgatgaaatgaagaaatgatatgaaatgatgaaatgaaatgatcaaatgaagttaaatgattaaatgatgaaataatgaaatgaaatgatgaaatgatgaattgaaatgaaatgatcaaatgaaatgaaatgatgagatgaaaagatgaaatgaaatgaaatgacgaggtgaaaagatgaaatgaaatgagatgaaatgaaatgatgtgatgaaatgaaatcatgagatgaaatgatgaaatgatgagatgatgtgaaatgatgtgatgaaatgaaatcatgagatgaaatgatgaaatgatgagatgatgtgaaatgatgaaatgaaatgaaataatgaaatgacaaaatgcaatgatgagatgaaatgatgaaatgaaataatgaaatgaaaggatgaaatgatatgaaatgattaaaggatgaaatgaaatgaaatgattaaatgaaatgaggaaatgaggaaatgaaatgatgaaatgaagtgaaatgatgaaatgaaatgaaaagatgaaatgatgaaatgatatgaaatgatgaaaagaaatgatgaaatgaagtcaaatgctgaaatgatgagatgaaatgatgaaagtaaacgatgaaatgatgaaataaatgaaatgaaatgatgaattgatgaaatgaaatgatgaaatgaaatgagatgaaaagatgaaatgaaatgaaatgatgaaatgaaatgagatgaaaaggtgaaatgaaatgatgagatgaaatgaaatgatgagaggaagtgaaatgatgaaatgaaatgaaatgttgagatgaaacgatgaaatgatgagatgaaatgattagatgaaatgatgaaaggatgaaatgaaaggatgaaatgaaatgaaatgatgaaatgaggaaatgaaatgatgaaatgaaatgaaatgatgaaatagatgaaccaaacatacttattcatttttttcttggcatccttctaagagtattttagtgaggctaatttctaaaaataaattgctattcaatggctatagagttggcctttgcaccacagtggtttaactgtgcaggtctacttagcaaaaccaacaattctatatccttctccacaccctgcccatgaaaaggatgaggatgaagacctgtttgatcatctacttctatttaataactagtaaatatattttccttatgattttctttttcttttatctggcatgtttgttaagaatacagtatataagacatataacatattaaatatgtgttaattgactgcttgtgttatttgtaaggcttacagtaggctattagtagttaagttttggggaagtcaaagttatagtggattttctactgtgcagggtggtcagcaccccagcctccgtgttgcttaagggtcaactgtacatgttatttcctttcctgtaagagaaaaatgatgagaaggtcttttctccaataagtgtattcaaaatgtagcagacttaaaatgtgtcggcgccaccattttgcgtttcactttgaaaacttattattaaaaatcgtactaaagcctaccttacttttccaaccttagaaaaaatgttacaaagaaaaggggtgaaaccatgctagtttgcactgaaatttgaaattatcttttaaaaatatatttttactttaattacttccaaaatagagatcagttgcatacaaatggcaggtcaccctaatccaccctacgactgcacttagattcatgaggaattgtgccatctagaaagggcagagaagaggagccacatgctttgattctgttgtcatggtgtacttactgccaggaagagggcatgtttgtgtatttttatgctaattattatccaagttgttaatgatttaggctttcagaacatataaagatttttttcctttcagatataaactatcttgcattgttcttctgatcatatgagtgacaaatttgcctaaatattcttcagaccataatattatgtccatacaaatgccagtagcaagagtagaatcaaccacaattgcctttgtaattatttaaagcatgtgtgcctataagtaattggcattttatataatcaagaatctttgatataataatatctcaactatttgaaacatggcttacatatattaattttatatgcaaatatatataatatcattgtatatgaaactaaattttggactttaaaacagcttcttagaatcttgacttaaatgtctaaagtaatatttgacttaaaaaatttagcacactgtcactatgatgaaaaaaattactataaaattatttaaaaattttttccaccctaacatttagactattctcacatttgtggttaaaacctattgcgattgttcttagaatttagataaaaaatgttccagaaagtttgaagagaagcactttagtccatttttatttgttcaagcatgaagaaatggcatttcattgtccttttaaaaactattcagattccctctttgaattcaagtgtttcaaagatattttaaaataccaaaataggaatagaatatgaagggctggttatgagtaatatgatacacttttatgagaggatgagattacaataacaatacctcctctcatagaatagccagcaagtctccactaaataagtgccttgattttatagatgtttaatcatggatattgagttaatgtgaaccatttgtagacacaggagtttattaaagaattatacaatatctttcaagtatttagaagcgtgttgaaattaagcctgcatccccacgattttcagaggtgctgatgcctaataaactcaaccccttgcatgccaaaattggcttaaagcccacccgttacccaagctacacttcaagcatcaaggctcaaaaatgtcattttaaatatgcaagagtttgaggaattcactactcacactttcttgaacagtctatccaagtgcatcaagcacaatgtgagtaaagaaattttgaccaaaggattgatagtaatgttgaatacgtttaatagtagatctaagattaaaaggtgagattgagggtgagaagagtgtatgaatgcttcgtgttatgacaaagagaatgtagcacccaggtcctacctggttggttgcattgccagtgcccacggtaggctattttatccaggtttttaggtttttttgttttgtttcgttttgtttctttcttttcaggagagttagtccaagaccaataactccataactggtagatttggaagatttcaatagtgcttaacattttgtacatagctttataacagttttctttttctttttttctgagagattattttcaatataacccatcatggttgaacttaaagtcattgcttatataaaatctacaactgctgatattttgtatcctttgcattccaggtaattctttttgtgcattttctgtgtttttctccatcagtctacctagatatttcttagatttaatattttaatatttttctgaaaaagtgagcttttgcatttttaaatatatactcagttgctttatttctgctttttcatgtactatttcctcttttttttttttttttgacacggagtcttgctctgtcgcacaagctggagtgtagtggcgtgatctctactcactgcaacctccagcccccacgttcaagcaattctcccacctcagcctcccgagtagctgggattacaagtgcatgccaccatgccaggctaatttttgtatatttagtagagagtgggtttcaccctgttggaccaggctggtcttgaactcctgacctcaggtgatccacctgccttggcctcccaaagtgctgggattacaggcgtgaaccatggcgcctggatatttccttcattctttatgtttattttactggttttatatatctgtctctcactgtttctctccttctcacattcactttgaagttgtcaaatagcccaggtgatgttacagattgactccttataaaaggagacattacacattacacatgcatcttagtggcattacaaaagtgtttggttcatttgtattgactattcacctttaaaatatttaaatagtcattaaaatagcttccaaccaatattattagacttatgtttctagctttctttattgtattgatatttaccttcattgctgtttgtttaggaaatatattgtgtcacgttatttccgtgaaaattgtttgaatttgtggtatggtctagaaaatgttaatttttgtaagtattctgtatgaacatgaaaatgacatgaattataatattcatgttccttatataacatttgccctttttaaaatctagtagcttcttttaaaacttagtcttttaatttcttcttttatctattactgaaggatgtgtgtttgaaaagtctataataatttgggggcttatccatttctactgacttgctgatatttttgctttatataatttgactctctctctaaatatgtgtttgtgtgtgtgtgtgagagtgtgtgtggtgtgtgtgtatatatgtatatatgtatcaggctaatgcacatttaagtcatcacatcttaataacttaaaacttttattacactggttagactaactaattttaataaatgtttctaacttacattctattttgtctacatagcaaccttttaaaaaattatattcatgtagtatgtttgcatgtatatcatatatacacacactatctgtattgtttgaacttcaaagtttctgaaaatttatatattagttgcctctcgtaactatgatagagacggaattttttaattttgccagtctttgtattttaacaaaaacattgtctacgtaggtttaagttaatctttgatcatttatacttaatttgttttattaatttgttatatatatatatatatatatatatatatatatatatataatgcctcattttttcctatcagggtctgtcttcttgttttttaattatgacttttatttttattgttttcatagatacaacagagaaatgcataatgtccagtgaatttattacagttccaaagtcggccgcacatggtggctcacccctgtaatctcaaaacttcgggaggccgaggcgtgtggatcacgaggtcaggagttggagactggcctgaccaacatggtgaaaccccgtctctactaaaaatacaaaaattagccaggcatggtggaacgcggctgtaatcccccctactcaggaggctgaggcaggagaattgcttgaacctgggaggcagaggttgcagtgagccgagatggcgccacagcactccagcctgggcgaaagagtgagtgagactcctacgcaaaaaaaaaaaaaaaaaaaaaaacttccaaagtcatactcacctttctgctcttgtcagacaattaaggggtctttgaatacttcagccctaataagttgcttcctaacatacatatttccgtgcttatctaattttaaatatctttttgtttcaacacctaattttttatttaggtctatctgtatgtttacaatgtattttgctctgtgttcattctttgatttcagaacttcaacctttctgaagcatgttttcagagtttctctgtagtttctttagtggaattctgctggtggcgttttgtttcttgtctctaaataagttatttagccataggttgataaatatttttcttggttgagaatttcagaatggcattattattcttaacaaataatattgtttattttacctttcattctttcagatttcaatatgattaaaggtaatttgatttttctagtgctaattgaaatatttttcccttcctgattgtttactatttctctaggagatgcgtaggtgtaggtttatctccattgtagcttgcttagcgtgcatggaatttttgaacatgcggattaatgtcttacaaaagtctagagaactttcagccaaaataccatcacatattgtcccttcccagttgccttcttctatgagaacactcactaaacacatgctacactttctcactgtatcttccatgtctcttcatgattctgtccacattttgcatttttttaaattttctgtaatgcattctgaaatatttatgaactctcaccatggccatctctaatctgatgagttcatttttgagtttttaatttaaaatattatatttttatacaaactgcttttcacatttgctacatcaattttttagtctcctaaaaatatattcattttattttaaatttttttacagcaaatgtgctttataatctaacagtgatatttctactaatgaaccgttgtggatctgtttgtactcttttctactttcctttcaaatggtggaatatcatttccttgcgtacttagatgcctttgaatgacaaatatttatttttctctgaaaattatttttgtggacttttgaggattagtaagaagaaaatttgccaaagagaatttgaatttttttgtgagtctactaaaggcaccaccattctgggaccacattatgttaattcttggcctaaaggtgtttggacgtatgtttggactgcacatttaaacaatttttaaattaattgctgtaaatcattaatgattgagtttctttaaatctgtccaatctcaagtcatttttacttgccgtttccagggagtgtgaaatgggactaatttacctctgattcttctttatactgaggatagaaattttggtcctagctttagggaggagctcctgtgtgatgccctatcttgggaaaaactatgtatttctttactgtcttatgtgatgtatgacagtaggaatctgcactcattcattttggtacatgtccgtagggcaaaatcagttttggtgtttaggtatattttgtctgcttcctgcattcccatggttttgaccttatattttacttttttgtgtgtgtgaacataccaatgcttcacttttttccagtaatataatcaactgtattatgagaaagagaaaaattttgataaaacacaaatttcatgttttcctattctaattggcttttatgtaaaaatacaggtaaaatttagttgtgcttttttgctatttctgtttggctattctctgtttgtctatgtcttctccacataggcacaattagggaattttgtacactcttgtgccaactgctttgatagtcacaagatgtatttctcgaactcctaggtataaaactcaagtatacacaatttaaattctttttccctcacttctattatgtttccagtctcaatagaaatcgatgccaatccagaaatacaagcattattctaatacttctcacacattacagatatagattaaattttctagatctccttaaatactgtcatttttcactacttgtatcttaactgttatattcaacattttctataatattaatatgttgtgaaaatttccttagtttcttatttgtcccaggttcaatgttttgcagtctctacctcaccctgtgaagcataaacattgtacatgctgtacaaataacacatagttcatgtacttagagattgcacaatttttatttggttgacaatagttaatgttttcttcttcattttctacttcctgatttttctttatttagtatatactacattatcataaaaataagaacgttttacaaactaaagctaaagcaaacctaggaataaaatgcaaaataaagatatgtaaacatacagttagatataccatgtacccttctaatttatttagacatgtaattttagtacaattttaattaaagtctgtgtattatctgtcatcgtcttagtattttttatataacaaattttgtaaatcaaaaagtctcaatgtcgttataaactatcttggcagaggttgatctccaaggaataatttctctcccaaattatgtcaatcagaatttcactctaccataattcttttagtcagtttcagaggaataataaatttcaaaattgttcaaggtacttgttgtagttcaagtacattttgacaggtgtaaaactgtagacagactgatacacacatattctaattgactcaaaagtatatgggacctactttaaaatctagattttaaaatgtcgtgtcaacatacacatgttctccttgtgaaataattgctttttattctctggatagaataatttaatctttaaaccttcaattcactgttaaaaacaaaatattacataaggatatgcttataaaagtaattcacaactagcttttcaattcagaaatatatgtgaaaaatcatcaagcatctaatggatttcaaggagaaatgggttagtaatttattccatatgtctcaatttttcctagactcaaggcttcctttaaaataattgtaggcgtttaagaaaccatgtaaactaaaaagaagaaattgtgacactgccgcttaggttttttaaatctttggacatgaatcaatatatttttatattttatcttaattagacatggtgagttcacaatcttcctgtcagtatggcatccaagctgattatcatagattacaagttcaactatcaactgtgttctgagagtctaaaaaaataaatgaatgtatttgtttgggtattcttacagcaggagtgaggacacagtgaaagtgagacaaggaagagagaacaaaataaaacaggaaagatagaaaagccaataccacacgtgttaagaggcaagttcctgtgttagatatctgggcttaattctatgggaagctatgtggaacatgcctcacaattgcatcactgaatccagggagattcttcttagttaccctcaccttttcttcccacttcatgcccaatatcaagctcccgtgctgctagagaaagtcctcagctagaaacaggtgcaaattctggagatgagaccttgtagagtgttaagaatggttttcttcccagcagctacaggtaaggaataggggctgggctattaatacatctgctacaaatcaataaagcccttatgctccttttggtggtcgacaatgtatttaaaaatattagatgatcaagaagggctgcagaaaggaggaaacagaaacaaacagcacacctcttggtttatttttattcatttcatcagtttcaaggaaaatgtgttgggagttcctggcatagagaatgtcacaaagacatgttttcaatagtggtgctatccctagggcacagaagacccagagaaagcccaagtggctgctggaaccaagtcagacaccttgccacctgtccacactccttggctctgccatcatgctgaagatcggtttaaaggactggcttccctccccgcaaaattaaaagagcacagactgagaagctgaatgtaggagacagcagtggattatgctgttctcgggggtcacctcaggtttagaagcattctttcaaattaacccatctcaggccatctgcagagaagaaaggtggtacccaactttttttcttgtcagcatttggtaggggtgttttattgaccaaatatgttcccacaacctagttttttgtaactaactaaatatagcagatttttaaattttatcaacaaaatctatagacaatttttgattaaaatagactccacatctatgtcctgcttttcttcttattattaattacattgctgtatcaaagaacaagacttcagaatcaagaatatcttgtctttgcattgaatttatacaaggtgctctttctttaatgctgtctcaaaggatatatttttactcattaaaaaggaagattagaatcttgttgtatgtactgctccaacatattaataattaaaattaggaggtaaatgtggtcaaagctagagaaagacttgagatgtcatttatattgattactgtgtagcgctctacaaacagaaatttttaaatattagtttatgtaaatattttgtagcatttcaaatatttgagtgcctgaagtttctactcttacatagttcagattatcaatttgaagacttactccgctagttaaaatgtttttagtctcgtttgagtgttatataaaagcaattttcagttaaatgtgttctgcttacataaaacattacaaattattgagtatttaattacattttcatgttcctgtaatgtctttagaagattttcatattattacctatcaatatatgtatgctttgtcaaagaaaaatcaaacatatatatcattgaaattgaaactttttaaaagtacttattaattctattgaaaaaccacatccataggaacaattacaatataatattgtgaacatgtaaatatatatcctatgtctattttatatataagcatatatgattaaaaatatagttaagaatttttaaacctagtattataaagtaaaaattagttaaacttctaatgattatatgttaattaagataaaattattttgatttgggtgattttaaatagagaaaaatattaaattacatgacaaaaattctttataaaatgtttaagatttttacgttggttttatcactttattccactattttattttaagatgacctgccttgtttaaaacactgtattcatcttaattaaattaaattccacttgtaaaaaaattaacaaatgatttgctctattatacagtgcggttataaactgagtcagtatctcaagatttgatccccattatcgtcatctgtggccctatttgttttataaatgtattgtctttttccatgcctgtcacatctctattgctcattcatttttctctttgtcccttatagggagcattgcctatctctagattaagcaaaagttgcatcttaaaaaagcacaataacctgctcaacctttctcacacagagaaatgtttgttaagtaattaaagtgtagatgatgatacaaagagcttgattaaattagatgccaaagcacccttgtgattcagaatatgaatggtatttaatttctttgaaatcaataattgctgagtgacattaattaatgccaatatttcagaagttgttctagttagtgaaatgtatacaacgtgcaaaagattcagaactctgaagggcaacattattctataattaagaattaagtattaattcacattagttattggggagaaataattaagaattaatgactgagaaaatgttttcattttttatttagagtactattttgtgcatgagcattactgcaagttttgcaagaaaaataaatttaaagaaacaattatgtgcacaagatgaatttaatgacatcttgatattttccacgattagagttttatttggtaaatgtttaaatgcacatcaactaaagagaataaatgaatcttggaaatcttgtaggtaagggtaaatattaggatgcatccaattacatttacacacacatacaattacatttacacccatacatgcacacacactcactgatacacatgtgtgcatatatatacatgaatttactaattgattttaactaatatttataagaaccagtaggattgatatatattgttgaacctgaaaaatatttattatatacatgtttaaaatacacaaacaaatagtaattgcactaggcatttgaaattgtactaaaatataagctgtgaacattttttgatcattacaaattcttacactgaataaatatttttatttttataatattaatatgtttgatacatgtgtacattttttacaatgtattattttatttttgtcatagagtcatgtcatgcataataacatttcagtcaaagatggattacatatacaaaagtggtcccaggagattataatacatatttttacatacttttctatgtttaagtatgtttagatacataaactcttatcactgtgttcttattgcctgcagtattcagtacagtaatgtagtacacaggtttgtagcctaggagagaggctataccatataacctagacgtggtaggctgtacaatctaggtgtttgtaatattctctgtgatgtttgcaaaatgatgaaattgcctatggatgcatctgttagaacgtatccctgtcattcagtgatgtgtgactgtactaaaatgctcaatctaagtttcagtgccctccataaaattgttgtactgtgaaatacaaatctctcacccatggcctgaatatgtttgcaaactaagcagatcatgggaaggagaatgtgctggcatcgctgggatgattttctcacactacatgaataatatctccagacgtcgcgaatatgagccacttgcagagttaaagtaggcatctctttgctgggaaatttatcaaatgggagtatgaagtgtttttaaaagatacttgtttgtagccggtaggcctacagtggctcatggcaatggttgaggttgctaagatttggtggaaggaggcaaaatgaaatggccacttatatggtatgtggatcacttgtttctgttgagttacagattcagctggctatttctcccaatgttagttatttggagaaaagaaacatgatggtaatttttgggtaacaaatacaatatttgatgaaagcaaatttattgagggttagacaaactacaagatactttaggctgcaaagtcaacatgagacttctggcccaaattgtgcagagtttgggtccagctgcaaagatcaaaggaagaggccatataagatgattttcacttttgacaccaactggcagttcaggggtttccccagaacaccctcagtttcaagaatttactagaaagactcacagaactcattgaatgccattgtactcatggtttataatagagaaagggtggaaattaggactaatcaaaggaagagacatatcatataaggtggaatctaggaggattttgaatgttaagtttccattgtcttcaggacatattacctgccattgttgtacagcaaaaaacatggagtactaccaacctggggagctcacctgatgctaaaaagacactatttagaaaatgaaaagacaaatgaaaggatgagataagatgaccttccacattaaggcactggaaagaatagcaaactaaacctaaagcaagcagaaggaagaaaataaaaattagagaaattaataatttataatattaataatatttgttagtattgaataattgatattaattcttgactagcttttttaaaaaagagaaatattcacttcccaatttattctgtggggccagtgttaccttgatacaaaaattagtccaaacagcatagaaaaataaaactacaagaagtataaatgcagaattccttaaaaatgctaacaaatcaaatctagcaacatataaaagaattatacactatgacaaagtgaaatttatactagtactcccaggttggtttaacagcccaaaatccattaaggtaatacatcttatccatagaataagaaacgagaattgcatgatcatctcgatagattcagaaaagacatttaacaaaatccaaatgctttaatgattacaaataaaaataaaaactcaatgaaccaggaatagagaactttctacaccagatacatggcacctgtgaaaagccaacagcaaacatgcaacttaatggtaaaagaaaggatactttcccgctatggccagagataagaataggatatatactttgacctcttctagtcaacactgtactaaagattttatgcagggcaaatcggcaagtaaagaaataagagtcacccatattgaacaggaagaaataaaagtttatttgcaaataacattcttgtatatggaaaattttaaggaatccactgaatggtagaactggtaaattatttcagcaatattacagcatacaagataaatatacaaaaatcagttgcacacatctacaatgaaaaccccaaaatgaaattaagaaaacacttcaatttacaatagcatcaaaaaaagaaataataattaatttggaaaatgtgatacaagattttactctgaaaattaaaaattattgtttaaagaagatctaaataattagcaaacatcttatagccatgaattggaagatttaatattgtagtacttcacaatttgaactacagatgtgatgaaatccctgcaagtatcccaacagacttctgtctagaaactgacaagctgatcctaaaatacacatggaattgtaagggactcaaaatagccaaaataatcttaaaaaaagaaaacatattaggataattcacacccacgtgctccaaaccttactgcaaagcatcagtaatcaagacaacacaatactgatgaaggaaaaatatatagattgatggaagagaattgagagtccacatataaaactatgtatctagagtcaatggattcttacagtggtgccatgtgcaatccaatgaggaagagacagtctttgaacaaactgggtcaacaacgtacacgtggatcaccacttgcaaaataataaattcgaacacttaccccaaagcatacaaaaatagtaactcaaaggaattaaagacatacatgcaagagctagaataaagcatatgggaaaatcttcaggattttggatctagcaaagaaatagctgtaacaccaaaaacatgagcaacaaaataaaaattagatatttaaaatttcttaaaaattaaagacattggtgtttcaaaggacaaccaagcaagtcaaaaggcagctcaaaaattgtgagaaaatatttgaaaaacacatatctatatgtctgtatatatacgtatcttgaatatagaaaacctgttttaactcagtaacaaatatcccaactcaaaactgataaatgatgggaatagatgtatttcccaagaagatacacgaacggtcaataatctcataaaaagatactcaatagcatcactcatcaggcaactacaaatcaaaaccacagttagatactctatggctacaactggccactttggaaaatagtttgatggcttctaaatatattacatatagaattgtcatatgacccagaaatttattcctaggtatacacccagattattggaaagaggtgttaaacacaaattgtacacaagtacttttagcagcagtatttaaaatagccaaaggctgaacacaactcaaatgtcaataaaaatattattgggtaaacaaaatgttatatccatgaaattgaatattatacagttataaaaagaaataaagtaccaatacgtacatgaaacttgatagcattatgccaactgaaagaagccaggcacaaaaggccacctattgtatgattctatttagattgaaaatagaataggaaaatctatagagacagaaaacagatttgtggttgcttaggattgagtaggggatgggtgcataggaggttaacagcctggaccgcatctttctggtgtcgcccatcaccatcctgcacgagattgacgaggccagcccgctcttcggcatcagcaggcaggacctggagacggacgactttgagatcgtggtcatcctggaaggcatggtggaggccacagccatgaccacccaggcccgcagctcctatctggccaatgagatcctgtggggtcaccgctttgagcccgtgctctttgaggagaagaacctgtacaagatcgactactcgcacttccacaagacctatgaggtgccctctacgccccgctgcagcgcgaaggatctggtggagaacaagtgcctgctgcccagcgcaactccttctgctacgagaacgagctggccttcctgagccgtgacgaggaggattaggcggacggagaccacgacggccgaagccgggacggcctcagcccccaggccaggcatgacttagactccaggctggcgacggggccctggagcagcggccctacagacgggagtcagagatctgagccaaccttggccgacatgcagcatccacccccagccggggagaggctccgcggtcgctcaggggcatgaccctatgccagtcctggagccacccagagaggacatctgaggactctgaagaccttggctgcactaacttctctgtgcctgttctctcctctgtaaaatggggctgatgatcataaagccacaggtaagaagtaggcaaccgcctattgcagcacgtggcacatgggcactgcctgagcaccagctttcctctcttgctgccgtgatctaggggtacaggcatcccaggtggggcaacactggactggtgctgtggctggaggagaaagggaaggccagtggggctgggccagttagagccagggaggaggaataggctggggctgcagctgggatctgctgactccaagtgtgatgggagcaaggaagacccctgacatgtttgatttttcaggatcattcctgttgccatgtaggaagcaggccagggaggagggccctgggactagggtaggaggctgactgtgcagcccaagaaggagcccgaggaaacatcgtggcatccaggctggtctgtggacttgggtgggagcagccaggcagatggggaggactagggaggagaagcttgcggagagtgatggcctctctggatgctttaaaatgcaaacaaaggcacagccactttggaggttggttagcaggatctaagccaactggggccaaaacatggtggcatctgtctccactcactccactccactcaagccctccaggccattcccatggcactgactgataggcatgaggccctggccccagttggcgctcaacaaatgctttattcttgataaagttaaacatacacttgtcagacgatcccaccttttgtcaactaggtactactcaagagaaatgagactcatgttcacacaaaaacttgtaagtggatgtttatagcagtgttactagtaatcacccaaacaaggaagtgacccacatgtgcctcacctggtgaggggacaagcaagccgtggcccaccccgagatggaagcatcccaagcagggagaagggaggttattgacacctggcaccacaaacatgtcccaaaggaagcggctgagcagaaggagccaggccccaccacttcctgctgtgggtcccacacgtgtccatggaagctgtgaacggggtaggggatggagaacacatccttagctgccaggggctgatggtggaggtgtggttaccacgagggacaggaggcagttttggggctttgtgtcttgatcatggctacacggatatgtgcactttgtcaaaactcacaggagggtgcacagcaaaggatgagtataggtacattacaccttaaattttttttaagtggggaaagaaaaagaagttgccacaaaagccttgtatgttgagccaccagcctgtgtggatttcagaacattggaggagaggtcgggtctgtaggttgagactgggtagtcaccagctgtggatggagtcaagtgactgagagattaaagacaccagacatctagacaccgaggatgtggcaaggcgaggttgggagagggcatggaggtggaaggcattgggactgacagaggcaaattggcaggaagattgacacacagataaaaagagatggttggatgagcagaaagtcaggcagagagacagacgtggactaacagacaggcagaaagtggaaacagagacaaatatccactaaccaagcaacacatagacagaaagatgctgtaaagatagaaagttgtgtaagtggatggttggagctaagggtagctctcaggtggacacagacagaaatgcagacagatgtcttggcttatgagtgcatgaacagcctgccctgattttctggggcattctgctagatcttggatctatggtgttggcattgacttacgtcctctttggagtcagagatgactcctctcgctcagtgccctgcaccacacttcccttcagctgggccggccactgctgcacaagtggctgcagaaatccctcctggcagggactaaggaaggcagcctgggctgctgtgcaccccaggccattttctgagttgggaaaaggttgctgtccaggtggtgtggtccgtgtaaaggcagtaaagggtttcaagaggcctgtcagtgcatatcatctggagtagggtgtgtgctggggagcagggaggaggaggagagagaaagcaggaaactttgagcttgcctgaggaagaccatccgcatggattgtgaaggatggctcatattgactgtattttcattcaaatgtgcaaaactatttactgaattttttttactgactgaaaataactcctgacttacagaatattttcatttccaagttacactttaccctgagttacatagcaggggcatccgtagtgattctgcaccccacaccctcaccagcccctggaagacactggctggcccttggctgaaatgacccaaatcaaaagcccttgcctttttgctaatgggcgttggggagattgaccagcaaagagctatggacaagaagcaggactgtacatataaaaaggacaaaaatcagagcccagtcccaggcctgggcagctcccgtcagcgtcccatcccccttgctctgaaccagctgtggcccacactttttcccatggtcatgcctgggaaatgaaggtgcggggacatgcaggcgagctggggcgtggagtcacatctgtttccagaacattcatgctaagggaggaacagggtccgcattggagaacatggggcgggtggctggaaaaagggaagctagagccacttttattgtttcctggggtaacagaaaacttggagccgcaagtgagtcctgggagagtttgggttaactggccccgaagccatcctgtgtgtgtgtgtgtgtatgtgtgtgtgtgtgtgtgtgtgtgtgtgtgtatgtgtgttccactatgtgtttttccctgtgtggcctctgtgtgtgtgtgtttgcctgaactggtttcagtggtgaaaatcctggtgctgacatggacagaatccatgaaagcatttcgagtcctaagtcagctgacctatgttgggatgtggcacatgttgcatcgtctgcctttgaaaagggattttctgcgagggcttgcaatgaaggcactctgatcagaaaatggcggaaggaagtcatgcccccaaaaggagccattagtgaatcccactattaattgttaagtcgtagattctgggctcaatactgccattttcatgatgttcaagtgatataaagggccaaacaatgtgaatctcaaaactaatgtgggaatagaatacttcctgctctttgactgtttgactaagcacatacatcaacctttccatatttttatttattttattctggcttgttttggatttaaggggaaactttcatgataattttaccctgaagccattttcctggaatgtgtctaggcaagggattccaactggaacccgtggaggccaggaaaacactagtcatcaggatgtactgcttcatctggggaacaccataagggactcaactccaggcactggtgtctggctcttgtgcatttgctaaattgacatgactccaggatctgtagcaggcgcacacatccttgatgaatacagtgaagtcttgtttttaccagcactcagttggccaaatatcttttccagcaatgagatatcagaggacacagtgaagttattcaaattagggtggaaaaatcaccaaaattcacttaaaatcatgtttatcgaaagtccagtgggatcaggttaggtagtaaataacaatacagaatgaatattttaacgagattacaattttaagcttgtcttttttcctttatgtttcattatttactcattgtacattcacagaaatacatttgctaagcaaagagaatgacatttggaagataagtgattaaatagtgtctaaactagttgcaacaactgacaccaccaccagtaacatgggctgttcattgaattctggcaacaattaaacatctattcatcagtatctaagataaaaaaataaaactttcatctctaaaatagtaaggtatatgttcaaacaatgcatccttaattttttttagagacagggtctcactgtgtttcccaggcaggtcttcaactcctggcctcaagcaattctcccacctaggcctcccaaagtgctgggattataggcgtgagccaccacgcctggccatccttaatttttaagactccaaattaagttggaatagactgatatatctaaatcagatgaagcatgtttctctttaaacaagggaacttacaaaacagaagtatttttgttacgtgagctaagaggccataaagccttatttgacagtgtgctacgtacccacgatggcagcatgaagacaaaaacagtaggaatcaaagcaattgtaatgtgcagataacatggttctttagggtcaaaggaaggcttcctttgtgctctattaatgaagcatagtattcatgatgcatgaacgtggaatgaaatccgaatgtcctttggcacagaaccacactcatttcatgaattgttcatgaattattgatggctgcttttacaaaaccatggcagaattgactagttgtgacagagaccatatggcctacaaagcctaaaatatttaatatctcaccatttatagaaaaagtttggagatttctgatgtaagctccaagaagcagccaactttgtctgttttgtgcacagacattctagctcataaggaaggcacttttcgaatttgtctgtaatggatgaatggacagacagatgggtggatggacacagggatggatagacagttcccacacaatgttagagttgaccaatggtcagaccatacatttatggcagcagaatctacaacctcatgggagcttatcccacagatttcagccacttactatgaagcaggcttagaaaagaccaagagtggggctctcccaggaagaagtgatagatgtggagcaggtggtactgatggaaggggctgagtggggtctgtggaggccaccatagttgaggaggatgtggaggctacaggcgctgatgcacaggggaaagttggcattagatgccagcctgcatgacccgagaacgcagagcagctcccgtgataaggctgtacccaaactccactttctaaatttcattttctgtccctttcatctgaatcatccctcacctatcaaaggacttttccacccctggctcctcctgtgctcgcccaccaaatgcaagggagctgtttgcctcatgctatgggctgtgtccccacaattcatatgttgaagccctaaccctggtgcctcagaatgtgactgcatttgaagatgggatctttaaagaggtaattaaagtggaatgaggtaatgagggtggccctaattcaatcggactgatgtccttataagaagagattaggatgaaggtgtgcacagagggtcaaccatgtgaggacacagggagaagatggccatctacaagccaaggaaaagcctgaggtgacaccgtttcccaggatccccgtggcagactgattgcatttgatcacttccaggatgaagagggtagcaagatgttctccctggaagaggcacttactctgaatatgggcttatcttctctgcccgcaatccttccatggaagtacgatctgttaaccacaaaccttttcaccatcatggtgtcccactcagaattgctctgactcaggaagctactttatatcaaaggaatgtggcaatgggtcagtgcttgtggaattcactgatgctgccttgttccctgccttccaaaagcagctgatctgggagaatagtggaatggagatttttctctctgaggcaaaggaaaaaaaaaaagaactttacctgattatgactttctctcaatagaagcaccatattgccaaatgctgcagacactaatacgaatggatgacaaggcagcagtccttgccagcacactcaagcagggtcagagaagacacattgcagtgggtggaatcacggcccctgaattatccaggccctcgcccctggaacctaggaaagttccctgacacagagaaaggatctttacagatgtgatttaaattaaggtcttgagaagtgggggattatgatagatgacccaggtggtcctaaatgcaatcacatgtgtctttatcagagggaggcagagggagattttactacagacagaagaggaggtggccatgtgaccatggaggcagagggtggaggtggccagcagccactagaaactggaggaggcgaggattggggtctcccggagcctgtggagggagcgcggccctgctgacaccttgattccagcccagtgaggcaggtttaggactcctggcctctgaactgtgacagaataaatatttattgtcttcagccaccaagtttctggtaatttgttacagcaaccacaggaaatgaatatatccatgccaaaattaatacatgcattccattttatattcttttccaaccttaaaataaaaccaacaagtgcttccagattttcttttatacttctctttgtgcattcagttcagtaaatgttcaaaaggataatacatttataaaatgtgatgccaaattgcataaaattgaccagactgaaggggaaaatttaccattttatgaaataaaatataatttacagatgaccagcattaatttatatcatgtcctgctttgggcttccaaattctgttggcaattttaccctggaaaaatatcatgaaccaaataggaaaactggtattctaaatacatttccttcatgtgacacacttcttgtgtgtggatgtaatgagaattcaaaaaaagaaaaaaaatgacgtgtttttattcctccctttattgccaaaatttaggcagcaaaaacaggcaccaaaggaatgagttaagacagatttagaagaggacaagtggaagccaggcagggcagaattctaagatgagggtcaagatcctcaccctcctccttagcggtggccctgggatgtgatgcgatgtcactcccgtggttatggcacattacatggcaaagacgatttccacagatgcggagatacaggctcttctcctgatggtcttcaaggggaaaaagccatgttgtggagacagccacctggcagggaatggataggctttaatccttctttaaatgtttggtagcattcaataggggagaatgctgtagtttgcatgtttgaccccttaaaagtctcatgttgaaatttatccccagtgttggtgatggggcctaatgggaggtatttgggttatgggggtggattcctcatgaatagattaatgctttccctcagggtgagtgagctcttgttctactagttcctgggagagctggttgttaaaaggagcctggcacctcctccctctctctcttgcctcctgtcttgccctgtgacctttgtgcacactggctcccctttcccttctgccacgagtggaagctccttgaggcctcaccagaagcaaatgttggtgccatgcttcctatacaggctgcagaactgtgagccaaacaaatctcttttctttataaattacctagccgcagggattcctttataggagcacataacagactaaggcatttgctgttttgtataaatggaatcacacaacatgtggccttttgtgaccggcttgtttcacttagcatcattttttcagcattcatccatgtggtcatgtgtatcaggactgcattctttttatggctgaataacaatccattgtatgtacacaccatatttgatgcactcctcactccttcatctgttgctggacacttgggttgtttaccccttttggctgttatgaataatactgctattaacactggcatgcaagtatctgtttgagtccctattttcaatgcttttgggattatacctaggcatggaaatgcagggccatatggtaattctatgtttaactttttgaggaaactccatgccgtttgccacagtggctgcaccattttccattcccaccagcaatatacaagagtttcaatttctccacatccttgccaacacttgttattttccattaaaaacattacaggcatcctagtaggtatgaagtgctatctcattatggttttgagtttcatttccccagtgacaaaagatgtgagaatctggtggcccagtgggctgagcgatctgctgggctggatggtggggagggttcacctgcctcctttgtcccctcccagagctcaggatgctttgtgatgtgggcctaaactctagtcaggagagcacattctctgctcaggtgcttgaggtggctgtgagcttcagatgatgaagaattttgtttggtttcttctgcattttagtgagccctggaactttggttccattttttcatttgtatggagttgggatcatctttctgctatctgactgcattcggtggtgtccacatttgccagtttggaaaaaacaagtacccaaatcagataatgaaacccaagggctgcccactgaagcagtaggctttcatcttcccttcccaactcccatttttctaaatctattattgggatggaaacacctagggatggggactcttgggagatttaaacatcagtagtctagaataggttgagcagggcagtagtctagagtaggttgagcagggaccccctgctaggcatggggcaggcttccagggctaagccccacactgcagtgcaggctgtggactagcttccctgccccctgccacctgcccaatgcaggagtctctgggccatgccattcccttttggtgggctgggctgggtagtgctgctggcctctggcaggctggtgggacccacaggagctgtctcaggggctggaccctgcagaatgcagcctacatgtgcctgaacagctgagattccatgccccacaatttagaaatccatgtagaaaagaattgtttatttgagattggtggagaaggatcagaagaccatatttttaaaaccaatgtatatatatgtatgtatgtatgtattttttatttagttttgcacctacactatacacaggatcaatcaattttaaaaatgaataacacggaaacgagacagatctcaatgaaacccatgtaagattattgatcacatgattcttaatcacgctctctcaggatctcaaactcaccaaaattgacctgcctcctggattccgtggtgaacaggctgtgagagtgtcccttctggttctgctcacaggctacagagggcagtaaacaggaggagaatctgtcattgactcaagagcagccagagacccttagcagtggagggagaaataggtgtacgggactcaagaccccttgcccaggaagatgagcaggtcctgcaccccagttcctgccatggggtccaataagaggaacttagtgtcagtgatttcttcttctgaagagagggaagggtaagactagccatggcatgaagccttgggcagagcccaggcacactgagcagcagagccatctcttgggtaaagggcatatggacacccagagacaagtgagccattgcctggagcctccagaggacggcaggctcatgcctggagccaacacaaggaaaagaagtccacccaagggggtgctcaagtcccaggcagagccaccctgtgattacagggcacccacctccccgagcacagcagagggcagagggctgcagctctgtgcacctgagtgtcagagagctccacacaataaggtcacaggcagcgcccgagaaaccaagcaaccttgcagtcacccactcccaggcttctagggaatgttttcccagccagatcctgacagcccggaccagagcagcagggccatgggccatgctcacacatggcagtttccttgagtcacccagaaagtcctcccccatcctcaatcccagcaaaatgatggccttacttctcactaccagccacgatgaatcttcctgaatggatacatttatttaccaaggaaggacagtgttttttcctctttgtgctgagtttgggggaagtttagaatatcccaggaaatggagctgagggaaaaggttggcttcagctctttcagagagccggcttggacttctggaaactgaccagcacctggcagggggtttgaagccaggtgggacacccatggtcatcccaggtttcttcacttgtttctgtgaatactgcctttaggaaaccaatacaaaaaacaaaaaacaaacaaacaaaaaaacaaaaaacaaacccaagcactcagggacttagaaagtgagaagactcatcaaagaacaagcatcaggacctggtcttgtcagtccttccaggccctcgttctactgaactgcatagccaccagggtgccagggctgcacgggaaccagacagtcacagttctattgttcagtctccaggacaaaaagaaaccagaacctttacatatcctgaacgtggaactaagatttgggagtcttgaggctctaagttcagaagggtgatgaacaatggccatgactgaatatttgggaggagaattgctttcacgtgtccccagagatcccatccaccccagttggaagctggggacaccagcactgtttcccgactcttagcttaggctcagctgaccccgagcttcccctgcccctccctgtatgggaacccagcactcctggcccagcctgtgtcttgacagtggggagggaggctgaggggcaggcaggaagggcagagccctggcacacctggcagtggaaggagaagctgttactaggcagggcaaagagcacagggagccccacagttcttcaagtagcactcgcttgctctccagcaactggaaggagccgatgccatgctggagacatggaaattaactcacagcccaccaccttcccccaaccacaagacagccctgcctgaaagtaggcatacttaccttaaaaaaaagctcatatggacaggcaaaggaactggcaaagctaatgcaattttgaaaaacaaggccaggggaggtggctcatgcctgtaatcccagcactttggaagggtgaggtggacagatcacttgagaccagcaattggagactggcctggccaacatggcgaagccctgtctctactaaaatcacaaaaattagctgggcctggtggcacacacctgtaatccccgctacccgggaggctgaatcgcttgaccccaggaggtggagattgcagcgagccaagattatgcgctccagcctgggcaacagagcgtgactctgactcaaaaaaaaaaagaaagaaagaaaacaataataaagttgtccctatttcaacacttttaacacagtgaataaagactgtgcccataggcagagggacagacacttcgatcaacaggacagaatggagacctaaattaaagtgcccaagtgatttttgacaaatgtgctcaagcaattcatgggaggaaaggtggcctctctgtcacagggaagtagggaaatcgcacatcacaggcacagcaagcaggcaggcagagagagagctcttgacctagactctgaagcctcaccatgtacaaacattcactcgaggtggatcacacacttcaatgtgaaatgcaaacctggaaaattttagggaaaaggattctaagagaaaagttaggtatctagggctaggtaaagatctttgaaagcttgaccacaaaagcacgatctgtaaagagaagtggataaattggaagtcatcaaaataactcatgctctatgaaagaccctcttaagaggatgaaatgactaaacacagactgggagtctgatccaggactcacatccagaacgtataaagaaactcttcaataacttgattgggcctcccctccctgcctagaagttcccaggctcctgggcgcccccttggaattagagaatctttcggggtccccggagtgactttccttcctgcatgtatgacaggaaggggaacccaggcaggaatttacagacactgtactcgtcctaatggaatgggcatctattgcatgagacacaccacaagccactgcccaacagcagagagactatggcaaggacaagagggacatgctgcatggggcaggttgcaggccagagtgcagccatgctctggggcctcccggggagatggggtgcacgtccaggtgggagaagtgagctttcaggacaagaggagggatggctttccagggctgggaccaattccttcctcatcttccatctctcaattccacattcttcctcctcactcaccacagtcatgggggctgaatttctgaattcctaagactctcctctcccggggaactggtggctgtcctgcccacctctcggatggctcctcccatccctggccacatccacctctggatgcttcttgccgtcacacagtctcacagccagccctgcaactgagcgcccacagtgtttagaatcctgcagccgctggccccaggctttgactccatgggctgaggcctttaaggacatcagcaggaccaagccaaaggagtgccgcccacccagccagagaacactgatgcagggagatggaaataggatttagttactgagaccttgtttacacaaaaatattctaagagaactcatagattggagggagtaaacctgtctctgtggcccatggagagcggctcaggacaactggggtcatggagaggagccaggagcagaggatgaaaagcaggaagtttcaatgtatgtggtttaaatggcctggctcagcaggaccccaggggttccaagtccactcctggtgaggccctgaataactcgtctctgcaggcagcagggagccactgcaggtgtgggagggagggagggtcataatgaatagcgggtttgagagattcctacagcgttttcttcctaatctcatgatggggttaggtaagcagcctcggcctcaaccccgctcctgctgccgcctctgccctcagattctgcctctgggtctccaggcagaggtgctgctgccccggagagggtgcttgaccttccaagggttcccgctgctcagaggcacacaatttagcatataattagagcatggaacagggaatactgtgctagttcctgggaaacatttcttctgggcacagtccgctgcatatgctgcaattgcactcaatggcccacccacaggctttgatatcacagatccattttagatcctttctcagaaaggaatggaaagaaaagaaagttgaatgcaaattaagtacactctgtcacagcctcgctatcagggtttcctggatctacagcacataaacctttcaaacatcacactgactacaaagcagtcatcggaatgatacttttgccaaatattcaaagaaaagaagcgcaaagcattgacaaaggttccagagggtgcaaagaaagcctttttattgctaggcataaagctatcacaaagcaacagggctgtgagggtccccagaacaaattagtacatacaaaaagactaagttgctcccttccactggagctaggaacaccttgaaaaaaacgaactggggttgaaggcagataactcaattacatatatctatatctacacacacacacacacacacacacacacacacacacacatattttgccagatctaaaatatactacaaagtgtctctactaaagccataatatacagcacagcaatagaccagctgacccatgaagactacaaagcctggaaatatcccagctatgtgtgggaatttggtatatgataaaggcatcatgtcaaatcactgaggaaaagatggacttttaaataaatagtgttggggaaactagatggccatactgaaaacaatgagattgggtacacatctcacatgtcacacaagatcaaactctaattgactggagatttaaatgtggaaactgaaaccatgtaagaaccagaagcgaacatgagtaattctgtgaaaacctgggtatagagaaggctttcatcattatgcttcaaagaatctgatgcactcacagaatgaactagcaaattaatacataaatattaagcgaaacctttttacatggccaaaaacaccataaatgacagcaaaatacaagtaaaaaattgggagacaatgtttgcagcagataggaggttaatctagctaatatttaaaaagtcttgaaattgacggaataaaaagaaaaatgtgaatacaaatggtccttaaagcatctctttgaatatttgcagctcagatgcagagaccctagggaatcctgctgttggccacctgcaggaggaaacgaaaatgagactgctcaggactgcggggtgagccctacagttctccctggacatggcctgttcagattcaaacccaacccacaccccaggtgtatagaagcctggtgagggcaggagggggcagagagggtccacagaacgttcaagtccaccagatgtggcccaccctgagggccgggatcccaacctaggcacttggtggctgaggaaaccatggtgggtatttggatgactctgcctgggcctgtgtccaaggatgcaaatgaccaccctcagtgattccaccaaggccagggagtcctcacctcggtcggggagcagcaggtggcaaattggagccctggctgggcaaacaggagccttggctgagttagtgtgacccaggatgagtcaaggctgaatgagttgggtgtccaatcctcttgctggtgggtggaggtcacatcccctcaactggaaacagggcgggctctgagacagctgtgcccactgaagggcagggaaagattcacctgctggtttctggcccaggactgagacactggcacctttccctgcctgtctcttgggactttcttttcatgatccctgagcctccatggaagaagtccaaccacctgagaccagcaggctggaggccaggtgcaggttctctggaagcaacccttccaaggcacgagtgcagccatccaggtctgaaaccagcccagaaaccactgaaaaccatcatgtgtcccaggtggagaccacatagagcagaagaattttacaggaaagacttgggatttctagaagtattcttggtatgacggtcatacaagtccatagaaagacgcacaggtattataatggttgagtttgttccatggaaacagtgggactaattataaatctcattaaaggatatgagcgaagactgaggaccaaactcctgtagaggttaagtgtgtgtacatagatcttctatttacttagaactcttcaggaaatttgcatgagaaatggccaatgattatctcttggaatgagagccagaggtgatgaatggcattttattttgattttacacactcttcactgtatgatcattttatactaaatatgcataatagaaataaaatcttctgataattattcacataaatatgagatccacaatacgagagataaaaacatctaaaaacaaaagagacccaggaaattgcatcatatgtgatccaatcctatcactttaaaattatccaaaggaattatgcacatttgctaagattttaaataatgtgactcttctcagttctctataagtgtgacaaattggaagtatgacattgatctcacactgaatcttgtataaaaaccacgaactctaatgcaatgatttttatattaaatttacttacataattaaacatatcaaggaattaaaggcaggagtattgtcatctggaatcagaagagctcacagccatctccactgttgattgaagatttgagtgaggggacttagagactgagtcagtgggctggggtctaggcttcactcctttttggatcaggtaactttaactttgtgtctgtttcattgtttatttagcactgctgatacaaacacagaagagcaattgatcctcactggtgttcttcagggacagctggtggtaggtgagggtgagctgggaggaaggtggcattttgggagagaaagagtgtccactccccaagcagtttgattttctggggctgtccctttgacaccaaagatgagcccttactgttcttttctatttctctaagctccctctgataatcacaggttaagaatttttttttgtaatagtactaattataataaacttttgattttactgccaatttaaaaaattatatttcatttttctccattcacaggagcaaatctgtgaacacatgctttgcctgtattgaatatgctcttgttctatgtattctgctttcatgaatctagttgcgcagtatttaatttttaccccttattgattacaaataccatttcaaggaaagcacagttttttcagtcttgaaggagaaaagggctttccacaggtaaggcaggtgggagtgagatcaagttaggatgttgaccaagaatggtttacacagcaaagcagtgcttacgactacaaaggtgcttgcaggcatctgtctggaggtctcctcaatagcaaagctcctatcctgccctttagattaatgcttttagagcctcactccatttccctggaggcttggactttctcaattttttcacttctggccaccttgtgcagatgtttccagaatggggaatctttattcctgtttctgcccaagatcattcctgggtagttctactatagtttggatatttgtttcctccaaatcgtatgttgaaatttatcctcagtgttggaggtggggcctaaagggggcagatccttcttgaatggatttaatgccctccctcaggggtgagtgagctcttgagctctattaatctcggggagagctggttgttaaaaagagcctgaacatcccctgtctcccttgcctcctgtctcagcatgtaatcactgcacaggccagcttcccttccccttctgccacaagcagaagccacttgaggcctcaccagaagcagagcagatgccagcatcatgctttcagtgcagcctgcagactgtgagccaaacagacctcttttcttcataaattacccactctcaggtgttcctttatagctacacaaaacagaccaagacaagctccctgcctccatttgtcacaaccgttgagacacttgttttcttggttttgtttgtcttagttgtttttgactttgcctggtcttcttcctcagttgttatctatatttaggagcatgtatttcacagggataaaatattcactaacgaatacttctattttattttcacccacattttaaaaagatacaattctcccttttgtagtagcaaatgtaggagattttcattactaaatggcattttatacatttttcttataggaattgattgatgtacgtatttctaacttcctatatggatcgcttcctcacattttcttaccttaaagaatgacttttgtagttcttgacagatgaaagggcttttctcagagactgtagcaggaagacagggcaggtgtgggagttccttagaaggggagggctggggcagcaagttgcatgacacctcctcagctggctcctgggaatgaagacaagaggctgtttaactacagacacactcagcaccatgagaaagctaaaacaaacaaacaaaaagctacaggcatatcttggagatattgcaggtttggttctaggccaccacaattaagagagtcacacaaattttttggtctcccagtgcatataaaattatgtttacattatatggtagtctatgaagtgtgcaatagcatatgtctaaaacagtgtacacaccttaattaaaaatactttacttctaaaaaatgctaacaaccctctgagccattagcaagttgtaatcttttggctgcagagccttgcctcagtgttgatggctacttactgatctgggtggtggttctgaaggttggggtggctgtggcaatttcttttttcttttttctttttttttttttttttttagagacagggtctggttctgtcacccaagctggagtgcagtggtgcaatgacagctcactgcagcctcaaactcccaggctcaagcgatcctcctgccttagcctcctgagtaggtgggaccacaggtacatgccaccatgcctggctaatttttaaattttttttttttgtagagatgtggcccttctatgttgcccaagctggtcttgaactcctggcctcaaatgatcctcccattacctgaagtgctgggattacaggtgtagccactgtgcccagcctgtggcaatttcttaaaataagacaatgatgaaatttgccacattgatcgacccttcctttcactaaagatttctctgtagcatgcgatgctgtttgatagcatttgacccacagaagatcttccttcaaaatttgagtcaatcctcttaaatcctgctgctgctttatcaactaagtttatgtaacattccaaatcctttgttgtcatttcaaaatgttcacagcatcttcagcagaagcagattctatcacaagaaatcactgcctttgctcatccatcagaagcaactcttcatcagttaatcatgagattgcagcaattcagtcttatcttcaggctccgcttttaattctaagttctcttgcaatttccactacatcagaagtaacctccactgaagtcttgaacccttcaaagtcatccatgagggttggaatccacttcttccaaactcctgttaatgttgacattttgaccttccatgaatcatgaatgttcttaacagcatctagaacagagactcctttccagtaggttttcaacttactttgcctggatccattagaggaatcatgatctatagcagctatagccttatgaaatatatttcttaaatgataaggcttgaaagtctaaaactaccccttgatccatgggctgcagaatggatgtgtgttagcaggcatgaaaacaacattaatctccttgtatatctccatcagagcttctgagtgactacgtgcattgtcaataagcagcaatattttgaagagaatctttttttctgagcaataggtctcaatcacaggcttaaagtgttcagtaaaccatactgtaaacagatgagctgtcatccaggccctgttgcattcacagagcacaggcagagttaatttagcttaattcttaagggccctaggattttcagaatggtaagtgagcactggcttcaacataaagtcaccagctgcattagcccctaacaaaagagtcagcttgtcctttgaaacttggaagccaggcattgacttgtcctttctagctatgaaagtcctaggtagcatcttatttcaatagaaggctgtttcatctaaattgaagatgtgttgtttagtgtagccacctttatcaatgatgttatctagatcttctggagaacttgctgcagcttctacatcagcacttgctgctttacctggcacttttacgttatgaagacagcttctttctttcagtctcatgaacaacctctgttagacttcaacttctcttctgcagcttcctcatctctcagggttcatggaattgaagagagttagagtcttgctctggatgaggctttgacccacagctggttccacacctctaaaactttctccagcccagcaataaggttgttttgctttcttatcattcttgtgttcactgagtagcacttttcatttctttcaaaaactttttttttttgcattcacaacttggctaaatgtttagcacaagaggtcaaacttttggcctatcttggcttccaacatgccttcctcactaagcttaatcattcctagcttttgatttaaagtgagagctgtgtgactcttcctttccccctgatcacttagaggccattgtagggttattaactggcctaatttcaatattgctgcatctcagggaatagggaggcccgaggagagggagagagatggggaatggcgactgatggagcagtcaacacacaacatttattgattaaatttgccatcttatatggacttggttcatgcctcagaacaattacaataggaacatgaaagatcactgatcacagatcaccataacagaaataacaataatgaaaaagttttaaatattgtgaaaattaccagagtgtgacacagaggcaggaagtgagcacatgctgttggaaaaacaatgacagatttgcttgatgcatgattaccacaaaccttcaatttgtagaaagcacaatatctgtgttaactcctgtttctctggaattgtctcacaaacttcaggttgtcaatgagagactgcttggaggctaagcctgctctgaggggctgcagctaccctgcccctggcagtgtctttgactgcaaggcgtggataaagccggagatttttcgatggagcagaggccagctgggtggttgcactgactcgtgataaccctggtggcagtgctggaggccggtgaggtggtgaagggcatggcacttcggacatgggcccttcttacatgcaggacctcctggggtgcagaggctaatttcatcttgtatggatgatgttcctcttcctctgtcaccagagatgagatttcgtgttcagatctggcccccatgagagtcatgtcatctgcgctgttttttattttgttctgagcttcccactgtgcgctatggctggtatttccccagtccatggctgtgattacatctctgatacacaaattagctacagcagccttgtttccaggggtgacctggaaatggagaggatgcttgaagtccttgctgcacatgatgcagaagccccatggtcctgggccctgagggactgtctactgggttgtcatggcatggggacaggcttgtaggacaagagcactggtcataccaagagaacctgctctgaaaattgaattttccacaagcctagctgtaacccaaggaccagtttaagctcatatttcctcaaacacactgccctgactcaaagacaaaccttacctccagctgtcactcaccagtcagagcttgccagctcccagaagcttcttcagagccaatgtgctttctttccaaacaatatctaacatttctctaataaaactctcacctttctttttttaaaaaaacttttaatttaggtttgaaggtgcatgttcaagtttgttatcagtttacgtaggtgaactcgtgtcatgggtgtttgttgtacagatttttttcatcacccaggtattaaacccagtaaccactagttatcttttctgctcctctgcctcctcccaccctccagcctcaggtaagccccattgtgtgttgttcccctctatgtgtccatgtgttgtgatcatttagctcccacttataagtgagaacatgtggtgtctggttttctgtttctgccttagtttgctaaggataatggcctcccactccatccatgttcctgaaaaagacgatctcatttttatggctgcatagtatttcatggtgtatatatgccacatgttctttatctaatctgtcattgatggtcatttaagttgattccatgtctttgctattgtgaatagtgctgcaatgaatatttgtgtgcatgtgtttttacagtacaatgatttatattcctctgggtatataaatcccaaatgggattgctgagtcaaatggtagttctgtttttagctctttgaggaattgccacactgctttccacaatggttgaactaatttgcactcccaccaacagtgtacaagcgttcccttttctccagcatctgttattttgtgactttttaataataagcattctgacttgtgtgagaagatatctcattgtcgttttgatttgtgtttctctaatgatcagtgatactgagcttttttttcatatgcttgttggtcatatgtattcttttgaaaagtgtctcttcatgtcctttgcccagtttttaatggggttgtttttctctcgtaaatttctttaagttccgtagagatgctgaatattatgtctttgtcagatgcatagtttgcaaatattttctcctattctgtaggttttctgtttactttgttgatggcttcttttgctctgcagaggctcttaagtttaatcagattccatctgtcaaattttgcttttgttgcagttgcttttggtgtcttcatcatgaaatttttgtccatttctatgtccaggacggtattgcctacgttgtcttccagggtttttacagttttgggttttacattttagtctttaatccagcagtccacaacctttttggcaccagggactgactctgtggaagacaatgttcccacagagagcagtaggcagggagatggtttcgggatgaaactgttccacttcagatcatcaggtattagttagattctcaaaaggagtgtacaacctagatccctcacatgtgcatttcacaatagggtttgcgctcttatgagaatctaatgctgctgctgatctgacaggaggtggagctcaggtggtaatgcctgcttaccagccactcacctcctgctgtgcgacctggtccctaacaagccacagacttgtaccagtccattgcccaggggttggggacctctgctttaatccatcttgagttaatttttgtatatggtgagaggaagcggtccagtttcaatcttctgcatatggctagccagctatcctaacaccatttattgaatagagaatcctttccccagtgcttgtttttgacaggtttgtcaaagatcagacacttgtaggtatgcggccttatttctgggttctctattctgttccattggtctatgtgcctgtttttgtcccggtaccatgctgttttgattactgtagccctgtaatacagtttgaagccaggtagcatgatgcctccagctttgttctttctgcttaggattgcccctgggctattcgggctctttttggttccatatgaattttaaaataaaaactctcaactttctctttgttcttggaacacactgaagaccacccaatctgtgagtatgccccactttgccattcttgcctcctaaataatcagtgttaagtttagagattcatctctacattttatttgacttcagcaatgtaaactgtgagtcagagctgcagtggtggaggctgcaaccttggcagcaggaaggtcagttcacagggtttcttggcatgctcctcctgtgtccccaccgtctataggtgccctccatcatacgtgtgcctttggcttgtagactggccttatctttccagaactatttttggtcatgcctcatgcatgagcttgtgcctgagcacaatgatgtgaaaattaatttagtcatatcttgtccaaactaaaaacattgaaccactttaaaggaaagcagcttcccaatgttgccatatattgttttaaaataattgtgaaaagtagttgctcatgtaacagcactgggcctgccattgaccttgcacaagatgcctcacacacatctgacagcctattacggtggacgcagtcctcagtgctgctgctgcatgggaccctgcttcagaggagctctgcaacagcaaaagtgccaagcagatcgaagaggacacagcaggaccatgtggggccctcctcccagtggtcagttacatcttcttttggtatcatggtggaggttgggggtgcccctgaagataccacctgagcttcctgtgcccccttcccatgcctgtacccaccatgacaagctgagcatgtttctgtagccgtcctctaccctgagtagatactctgcattcttactgtgcaatgctttcaggactgtgcctctgtggtcacccctgtcatccagctctgttatggccatgggaaccagaatctggcatgttccagcacctcattctgcagttagaaatcaacaaaacctcccaaatgggagaggagggcctaaaacccttggaaaatttcctctgcgagatttgcatgagacttggaatgccctgaagtttaatatatgaaggtatttgaatgacacatagaactccgtgtaagacaggtgtagccaacagagaaaaccattcatgtcaacattctccctcgtgctctttcagagaccctctgagttatagcacccagaggccctggatggcttgctagtggataagccccatgcacaggcaggagagtggcacattctctgggtaatgaagtatcctatagctagaagattagaaacaattctacatgaaacatttgaaagtatctcttgatcagtttgtttctgaagacacagctttcctttgggaaacagtaacccagagaaaggtctccacaaccaaaaagcaccgtgaattgttagttgcattttgcctggtcacgtgagtgaatttcctcctggactgcattgaatctgcactgttttggagactggcagatgcatcgttgataaagccacatgtgcagggtcaccatcagttgatgtacttccatcctagttgatgctgttgatttttccctgccaggaagcttcctgacacagcctgcaccccagtggacttcccaaagcaagttgagtctgactttgcacccctgacttgagagtcatctgacttctgggcatgccactgaatactgatgtacctgaaggaaccctgggtaccaaacgtgctcaagtgaatgaatgatgtccaggacaaagcccagcaggtgtccagacaatggcctcccaccagagatcttgtcagcacgccggtctgagcactgtgtgccttagtgtctttctgtcctggttgcaatgaagtctttctccataatgtcagtttttatactttttgacctagtaggacatcatgtgatggattttcacgtgatatgaattcagcctaggtatgtcttaggattggtttagagggaagactgaagcaggtgaaatggcaaccccttgaatacacatccgaaataaattgaaaaatattcagcatgatttaatggtattttttaaaataggaaacaaaatatttcctgttcattagaatcattacatcaactaaagtcgtcataactaaaatcatcattacatcaactaaaatacaaaatatggaatctaatctgatcttcagcagatgttggcatttctttaagtacacgtctttacttctgcagtgcactaacagagactcaagaatgacaaagggggaaaaaaggcaaaattaggaaaaagggagacattttgtagttgatgttggatacactggatggactatccatttgatataccttctcattgatagaagaggaaacttcaggtttcacaaaggcaaatagtgtttcatgagaaaaagcaacagaaaaatatcaataatcaaaatattttagtgttttatgaagaactgtattgtagcttgaatctttaattaaataaatgttttcttttgcatgtaaaatagaattcagcctttcctaactcaggacagcaatgggctgaagacagtgctgggcccatcctgccacctgctgggaggccttgttccctcaaaagacttggtttggaaggatgattggaaaatagctttacacacccaccctttattgtgtttttattcacaaagccttaatataccgccatacttcatgtagttgatttttcatatctctgataagtttttaaatgtcagtattcctactaaagtctctctctctgtcctgtgttctgtgttctagggtgtatgaagaaagggcttcagcagaaacagaggctgaagctgcctgtgtgctgggggctgagaggccagaggagaatgtggtgagacatagaattggcatggggagtgtccccagacctactgatgactttggctcacagataaccaggtccctgagcaagggtgctgactgcagcctctctgcacaaccaggacaccaccatggggtggggtgcataatgtgtggggacatccacactgttgaaggggaaacagccaggaaaaaagaagcggcagctccattgtcaccacgagacacttccccaatgcatcaggtttgcaaaaccgtgggtgcagagcagtgtccacacaggctaccttttctgttcaaagtaagaaccacaaaaaagggcccagtcacagaggctcatgcctgtaatcccagcactacaagaggccaaggcaggaggatcgattgagcccaggaatttgagaccagcatgggtaatataggaagaccctgtctatacaaaaaaaaaaaaaaaaaaaatttaattagctgggcgtggtggctcatgcttgtagtcctagcaacttaggaggctgagtcgggaggatcccttgagccctggagtttgagactgcagtgagctgtgatggcaccactgcactgggtatcaaagtaagactcaaaaaaacccaaaccaaaaaaccaacaaaacaaaaaagcaccacaaaaaagatatcatagcaatgctgtgtgtacgggagtctccagcaggacacacaaacaatccagcgctgacctctggagagaactgagaggctggggatgcagcagggaggggacgtccactccgtgcctggattcctgtgaacatggggccgtgcacaatgcccacgaaaatgaaaatgaaacctgccagcctgctggccagggacttgtagtgaagcacaaacaccacggacgtgactgttgctggtggaggtcgcagcctctggatgcctcagtggcactgttcttgtagctgagcggaaatgcccacagcatctgcatctggcacgtgcctgggggcctgcagccgcaacaacctcaaccggagatactgatggtgtggaaaggcagagacactgatggtgcgaaaaggaaaaggcgtctgggagggcctgtgagctggagggcagccatcggggaggtggaggagaaccctgaggcgggtttctccacatgagagatgtcacctgaaaccacccggatgctggccaaggctttggcctcctcttgctgcctctgtatttccgaaaatgcatcgctaatggggtgaagggactcaccctcaggcctgccgccccaccaggctgggccaggacaccaggcacccggcactaccccatcacagccccaggctgcgtctgtgtgtctgggcgtatctgtatttgcatgtctgtgtctctgtatctatgcaggtatagatatgtacgtctctattatctatatttgtgtgtccatgtatatgtgtgtctatgcagatgtctatatgtgtgtgcctgtgtgtccatgtgtgtctgtgtgtactgatgtgtgatcgtatgtccctgtgtctgtatgtgacgtgtccacgtgtgcacgtgtccgcatctgtgtgtactcatgtgtgactgtatgtgtccctgtgtgtctgtgttgtgcatacccatgtatgtctgtgcacacatgtacatatctgtgtgtagatgtgtctgtgtccctgtgcacccttgtgtagctgcgtctgtgtccagctgtgtaagaggcttcagcaggggaagctgggctctgccacaggccctgatgagagtcaaggccataaaacaaaccctctgagccccaaacacctggtcctaggaatgggctggacttgggagtaagtcagcccagagcgactgtgagggccccaagcctgcaggaacaagaatgaagaggagtcctgagtctggggtccaggaccctccccagccagtaccaagagggcaagagagagatcacagcaggccctgctgactgggctgattctctgccctggagactgcaggccaggggtcttcctcttggcctcccctgccactaggtgatgctcagggctgggggtaaggaatgacacttcatgccctggagctgcctgactggccctggctgtgcctgctgcagaagtgatatcagctgacatcatgaggtgtgacgtcactgaggcctcctcaaagctgagtctgttactgtggaagaagcccatcagtcctcgtcctcaggaagctcatgattcaggcaaggaaagaggcccacagccagatcactctgatttgtgcactcaggacatggccacggaatcaggcaggatccagccaggaaaaagaagccctccagttctctctgacagagagaacagtgtctagggagctggtcacactgtgataaaggctctgagagctaaacaggttgaggaggaatccaggattgaaatcagcaggaagccaccgtcccaggctggaggcagggaagaaagcaacagggtcaacagtcccaggggctgtgttcacacaaagaggcctgttcactgtcaacattagacagatcaatgagacagaaagtcaacaaggaaacccaggaattgaactcagctctgcaccaagcagacctaatagacatctacagaactctccaccccaaatcaacagaatatacattttttttcagcaccacaccacacctattccaaaattgaccacatacttggaagtaaagcattcctcagcaaacgtaaaagaacagaaattataacaaactgtctctcagaccacagtgcaatcaaactagaactcaggattaagaatctcactcaaaaccgtccaactacatggaaactgaacaacctgctcctgaatgactactgggtacataacgaaatgaaggcagaaataaagatgttctttgaaaccaacaagaacaaagacacaacataccagaatctctgggatgcattcaaagcagtgtgtagagggaaatttatagcactaaatgcccgcaagagaaagcaggaaagatccaaaactgacaccctaacatcacaattaaaagaactagaaaagcaagagcaaacacattcaaaagctagcagaaggcaagaaataactaaaatcagagcagaactgaaggaaatagagtcacaaaaaacccttcaaaaaattaatgaatccaggagctggttttttgaaaggatcgacaaaattgatagaccgctagcaagactaataaagaaaaaaagagaagaatcaaatagacgcaataaaaaatgataaaggggatatcaccaccaatcccacagaaatacaaactaccatcagataatactacaaacacctctacgcaaataaactagaaaatctagaagaaatggataaattccttgaaacatacaccgtcccaagactaaaccaggaagaagttgaatctctgaatagaccaataacaggatctgaaattgtggcaataatcaatagcttaccaacaaaaagagtccaggacactatggattcacagctgaattctaccagaggtacaaggaggaactggtaccattccttctgaaactattccaatcaacagaaatagagggaatcctccctaactaattttatgaggccagcatcatcctgataccaaagcccggcagagacacaatgaacaaagagaattttagaccaatatccttgatgaacattgatgcaaaaatcctcaataaaatactggcaaaccgaatccagcagcacatcaaaaagcttatccaccatgatcgagtgggcttcatccctgggatgcaaggctggttcagtatacgcaaatcaataaatgtaatccagcatacaaacagaaccaaagacaaaaaccacatgattatctcaatagatgcagaaaaggcctttgacaaaattccacaacccttcatgctaaaaacgcggaataaattaggtattgatgggacgtatgtcaaaataataagagctatctatgacaaaccctcagccaataacatactgcatgggcaaaaactggaagcattccctttgaaaactggcacaagacagggatgccctctctcaccactcctattcaacatagtgttggaagttctggccaggtcaattaggcaggagaaggaaataaagggtattcaattaggaaaagaggacgtcaaattgtccccgtttgcagacgacatgattgtatatctagaaaaccccattgtctcagcccaaaatctccttaagctgataagcaacttcagcaaagtctcaggatacaaaatcaatgtacaaaaatcacaagcattcttatataccaacaacagacaaacagagagccaaatcatgagtgaatttccatgcacaattgcttcaaagagaataaaatacttaggaatccaacttacaagggatgtgaaggacctcttcaaggagaactacaaaccactgctcaaggaaataaaagaggatacaaacaaatggaagaacattccatgctcatgggtaggaagaatcaatatggtgaaaatggccatacagcccaaggtaatttacagattcaatgccatccccatcaagctaccaatgcctttcttcatagaattggaaaaaactactataaagttcatatggaaccaaaaaagatcccgcatcgccaagtcaatcctaagccaaaagaacaaagctggaggcatcacactacctgacttcaaactatactacaaggctacagtaaccaaaacagcatggtactggtacaaaaacagagatatagatcaatggaacagaacagagccctcagaaataacgccgcattatctacaactatctgatctttgacaaacctgagaaaaacaagcaatggggaaaggattccctatttaataaatggtgctgggaaaactggctagccatatgtagaaagctgaaactggatcccttccttacaccttatacacaaatcaattcaagatggattaaagacttaaacattagacctaaaaccataaaaaccctagaagaaaacctaggcattaccattcaggacataggcatgggcaaggacttcatgtctaaaacaccaaaagcaatggcaacaaaagccaaaattgacaaatgggatctcattaaactaaagagcttctgcacagcaaaagaaactaccatcagactgaacaggcaacctacaaaatgggagaatattttcacaacctactcatctgacacagggctaatatccagaatctacaatgaactcaaacaaatttacaagaaaaaaacaaacaaccccatcaaaaagcaggcaaaggacatgaacagacacttctcaaaagaagacatttatgcagccaaaaaacacatggaaaaatgctcaccatcactggccatcagagaaatgcaaatcaaaaccacaatgagataccatctcacaccagttagaatggcaatcattaaaaagtcaggaaacaacaggtgctggagaggatgtggagaaataggaacacttttacactgttggtgggactgtaaactagttcaaccattgtggaagtcagtgtggtgattcctcagggatctagaactagaaatacaatttgacccggctatcccattactgggtatatacccaaagactataaatcatgctgctataaagacacatgcacacatatgtttattgcagcattattcacaataacaaagacttggaaccaacccaaatgtccaacaatgatagactggattaagaaaatgtggcacatatacaccatggaatactatgcagccataaaaaatgatgagttcatgtcctttgtagggacatggatgaaattggaaatcatcattctcagtaaactattgcaagaacaaaaaaccaaacaccgcatattctcactcataggtgggaattgaacaatgagaacacatggacacaggaaggggaacatcacactctggggactgtggtggggtggggggagtggggagggatggcattgggagatatacctaatgctagatgacgagttagtgggtgcagtgcaccagcaaggcacatgtatacatatgtaactaacctgcacattgtgcacatgtaccctaaaacttaaagtataataataaataaataaataaaataaactttaaaataggcaaaagacttgaatagtaggtgaggcatggtggctcacacctgtaattccagcactttgggaggctgaggcaggcggatcgcgaggtgaagagatcgaggccatcctggccaacatggtgaaatgctgtctctactaaaaatgcaaaaattagctgggcttggtggcatgcaactgtagtcccagctcttctcggcaggctgaggcacaagaatcatttgaacccaggaggtggaggctgcagtgagccaagatcatgccactgcactccaggcaggtgacacagcaagactccatctcaaaaaaaaaaagacttgaatagtaattccaccaaagatatacaaatggccaataagcacataggaagatgttcaaaatcattagttattagggaaagaaaatcaatcctaaaatgagacatcacatcacacctactagaatggctataataattaaaagacaacaagtgctggtgaagaagtggagaaattagaacccttgaatattctcggtaggaatgtataacggtacagtcactctgaaaaagtctggaagtttctcaaaatgttaaacatagaattaccatatgactaagcaattccactcccaggtgtatacccaaaagaactgaaaaaaatgaactcagaaacatgctgagtgctgatgtgcaagtgttgatgttggctggggacaagagaagaaaggaaagtccaaggacagtattcactgcagtattaatcacagtaaccaaaaggtggacacaccccaggtgtccatccatagatgaagggataaacaaaatgtgacatatacatgcaatggaatattactcaaccatgacaaagaatgaagttctgatcaatgctatcagatatattgttacaacctggctgaacctccaaaacattaggctaagtgaagtaagccacacataaaagggcaagtattgcattattcctttcatgtgagaaacccaaataagcaaattcatagaaacaaaaattacattaagaagttaccagggtatcagggaggagagaatggaaagttattgcttattgggtacggaatttctttttgggatgatggaaaattctggaaatacatagtgatgatggttgtaaaccttgtgaatgtaattaaatggccactgaactttacacattttaaatcaatcctttctaaaaaccagagaaatggaatggcatatattacttatcaaaggctgtgctggatacattatagccattatcttactgagcttcaggaatgtctgtgaggtgggagctcagaatggccaagtatctttttttctcacagctaggaacaggcagtaaattttttcactagacaatagatacttttctacataagggccaaggatcatctgccagggttatttaatacaaaggagattttcacattagaaagcagattattaatacaaccgataataatagtagcatgccctttgcatacattatctccttaatcctcacgaatacaaaagaaagaacctaagacatcagagagccacttaggattaagaatgcaagttgcccctaatatgcatcctctgtccttaaagacctgagctactaacatggaaaagattgaaaaacactgccttcaggtatgaataaacatatattacatctcagtgagaatgcatcacttaggggcaagggaagcagttgcttatctattttgtcttatctactgataactaaattcagaaattgtaatagaatacaaatgttataaatatattttctcttaatttttaaagagcaatggttacagtctgaaaaactgtcattcagcaactagtattcaaaagtgccatactgaggcgaaatctttttggttttcagtatctagctttatcatgtcacaattaccttcagattctttttccacttatattgcaaaaatgcaaatgaactcaaaactctaggtaaatctataaacctatacctatgaatcaacctttaattcattacaaaatatgcttgctctacacacactttctttcccttttttatgtgcattatcttatttaatcctcaaagcaatcctctgagttaggagatttttttttaaagggatacatgtgcagaacgtgcaggtttgttacataggtatacatgtgccatggtggtttgctgcacccatcaacctgtcatctacattaggtatttctccccatgttatccctcccctagccccccaccccccataggccacagtgtgtgatgtttccctccctgtgtccatgtgttctcattgttcaactcccacctctgtgtgagaacatgcagtgtttggtttcctgttcttgtgttaagtttgctgagaatgatggtttccagcttcatcctgcaaaggacatgaactcatcctttttatggctgcatagtattccatggtgtatatgtgccacattttctgggagtgtaaattagtcattcttctttctttaaccttaaaatttgaatttatagagctttaagttcttgactgtaaaatcaaaaagaaaaaagagatgtgaggtcaaaggaaggagagatagtgaaaaatgggccagtagttaaaaagtaaaatttttcagtaaagagtaacagttaagatggttgttcatgttgttattgaaacaaaagaggtttggtctaggtcctgctgctcaccgcacagaaacccaatgacaagtattgctaaggaagaaggctgtaacctggtgctgcagccaaggggacagaagctcagtctcaaatccatctccttcactgactaaaactaggagtctatttggcaggaagaaatgtaacaatgtataagaaaacaggaactagggaggagcaaggaagcatctggtactgtgatctggtgagtttcagctttttgatactttctgaaggtctttttttgaagagggaaggcagataaatacaagtttcaagctttagcagcagggttaaatttctgtatttattgtctatgagactatcaggatggtttcaaagtaagcaatgtttctacaggtcctttttgttcttttaaaatctgaaataaacctttgaatgtatgttatatgctaaacctaaagaaaatccatttcatgtgctaaacaccagagtagatcgaagtaaaagctgttacaaatagcctatgagtatcaagtttgggaacactatgaaaaaattccaaaaaaggtaatcaattcataaaacttacagatgaacaagtgaatatttcagaattcttctcagtactaggtatcagcatgaccttatcaatatttgcattactaaccatacaataagaacctgacttctgactattctaaggtataaatgtgtactttaccttaaataggaaaatgtgtcatgtatccattttgagatttagtacaagattcacagaagagaaaactgatagccctgtatcgattaaaagcatttttttttttttgagatacagttttgctcttgttgcctgggctggagtgataagatcttgactcactgcaacctctgcagcccgggttcaagtgattctcctgcctcagtctcctgagtagctgggattacaggtgtctgccaccatgctgggttaatttttttatttttttatttttatttttagtacagatgggatttcaccatgttggccaggctggtcttgaacttctgacctcagatgacccacccacctcagcctcccaagagatggaatctcactatgttgcccaggttggcctagaactcccaggctcaagtgattctcccacctcaggtttgagtgtggctgggacaatagagtgcacacccagatgagggtaatttttgtaacaaagggagttaggaaactttctatcagagaaacctcaagtcccagatggtttcactggcatattttaccaacttattaaaaaaaaagaatgtaattaattcctaatgtcacaagcagtcaattactgaaaactgaccgctaaaaacatgaaattcccttggacatggcctaatatgtgtatacacatattcacataattacaagccagaaagtttactcaaaacactttcagtgctatttaaacctgataaagctatcctttgagagaaaataaaccttattaggcaattgcaaattaaaaccacaatgaggaatcactgcatatcaacttaagagggtaaaaataagattgaccttaccaagtattcagaagaatgtcaaccaaaaatctcataccctgatgatgaaaatgtaaaataatgcaggtgctttggaaaagtttggcatttccttcaaaagttatatacctaccatagatcccagctattccattcccagatatctactcaagataaatgaaggcctatatccacagaaaaacttgtacacaaacgttcagagtagctctgtttgcagtagccccaaactagaagaaccgaaatgtcaatcaatggacaaagggatgagcaaattttgacccagatatacaacagggtattaatcaacaacaaaatggaatctcctattgatacatgcaacactggatgaatttcaaaacaattacgtgacgtaaaagaagccacaataatccccaccccttgaaaacagtccacattttatcatatcatatgatatatataggactttctagaaaatgcaaattaagctaaaacagaaaatcagcatgttgcctgaatactaggcagggtcatgaattacaaggggacacgagaaaacttttgggggtatggatatttcattatctcagttgcagtgaagatggtttattaggtatgtacatgtcaaaactaactcggttttatactttaaatgtttaatttactgcaattatgcactgataaaaaaataagctgactatatctgcatttgcctataggtttattttattttgcaacactagaaactgggattgaattctaaattgtgccacaacttctgcttatgcttttacgaacatgaatgactactttatatatcccctgaattgtgtgaattgaccttatatccacatttttaaaatgttttatcccagtgacttatttacaaatatagatgtccatcaagaactaatcgataaaatactacttaagaagttaaagcaactgataaactttaattttaaccacaaatattttttagaaaaaatactgcgttaacccttattaccttgaatgtgatataaatcataatcaggatcttctgattcttcctttactgtcacagctgccacttccagggaaatgcctataaaagcaaattaaattatatgattgcatgtcagggatttcagctacattgtgtagggaaatcctctccacgctccctataaatacagcaatgaatacccattttagataaagaatttaaaagtctttgaaaggacaaaaatttgctaggtagcagagtgtaggaatcacctatagtcccaaccaagacaaagttttaatcactcattaatattctgcaattatttgctgctaatttttttctccagcaaattcttatctttagaattaaagaaaatttagttacaatccatgttcactgaatattaaaaatactattataaaccattgaaaaacacttacatacatcagttttaataactcaatattccagagcagagatggtataatttttggcaatttcaataataagatacaatgtttttttttctcctcataaatcccttttattaacaagaggacaaagcacacctttctgcataaagctttgcccacatttaggacaggtaatttgaagcagacctttgtggccagatacaaaagagtgcatattgggtaactcctctcatttgaaggtcaaaataggcaaatgaaatctttgttattgaatatctaggctgggtgtggtggttaatgcctgcaattctagtactttgggaggccaaggcaagcaaatcacctgaggtcaggagttcaagaccagcatggccaacatgggtgaaaccctgtctctactaaaaatacaaaaatgtagctgggcgtagtggcacatgcctgtagttccagctactcaggaggctgaaacagaagaatggcgcgaaaccccaaagtggagcttgcagtgaggggagattgcgccactgtgctgcagcctgggcgacagactgagactctgtctcaaaaaaaaaaactaaaaatattaatgtaagggtagcaaactaaataaggaacacatttttgtgcaacagcagattagaaagactatagttaacaacaatgcattgtacattccaaattagaagagaggactagagatagaatcttgctctgctgcccaggctggagtgcaatggtgtaatcctagctcacttcagcctccaattcctggacccaagtgaccctctagcctcagcctcctgagtagctgagattacagacatgcaccaccacacctgtctaatttttgtattttttatagaggtggggttttgccatgttgcccaggctggtctcttaactcctttgctccagcaatccacatgccacagcctgctgagactataggcaagagtcatcacactgagccataagatattttttgaactcatgtgaaagcatagttaaaagccccacaatgccaggatctgcaacagtgagaattcagatataacacaactgacaactggctcccatcctctgcaagaggttaagcccagagacatcactgatttttcaaaaatgtaaaattgtgtttcatatgataaaaatttttggactccacatataacctaaagacgggttacatagcttaaaggaacatataagctataaatcccttaatacataaactagtgccaggcacagtgctgcatgcttgtcatcctagcactttgagaggccaagttgagtggattacttgagcccatgagttgatttttgaaaaatgttttatggcaagtaagcggagaaggaatggtcttttcaacagatgctgcgggtacatcacatgcaaaatgatgactttaaactcttacctcacaatatgtgcaaaaaataactcacaatggatcttacccccaaacataagagataaaactataaatttcaggaagaaaatgtaagtctaaacctttgtgaccttaggttggacaaagattctctagatacaacaccaagagggcagtaataaaagaaaacttgaaaaactgaatttcaccaaagcaaaagcttttgagctataagggacaccatgaagaaaatgaaacaactagccagacagaaacaatatgtgcagaatcttatttctgataaaagacttgtatccagaacatatcgagaactcttgtaacttgtaaaagaagaaaaacacaatttttaaatgggcagacacttacatagacatgtcaccccccacccaaaaaaagtaaaacaaaataaaatcttcatgcctttgggttaagcattggtttcttaaatatgaagtcatggccggatgcagtggctcacgcctgtaatcccaccactttgggaggccgaagcaggtggatcacgatgtcaggagatagagaccatcctggctaatacagtgaaaccccatctctactaaaaatacaaaaacttagccgggcgtggtggcacatgcctgtagtcccagctactcggtaggctgaggcaggagaatcgcttgaactgaggaggaagacgttgcattgagccgagatcatgccactgcactccagcctgggtgacagagtgagactctgtctcaaaaaacaaaacaaaacaaaacaaacaaaaaaagaagtcaaaggcacaagtgccaagagaataatctagtttctatcaaaattaaaaacttttctgcctcaaaacaatactaccaagcaagggagaagacaatttatatattaagaataatgtagaattattagaattggagaaaatatttccaaatcctacaccacagcctgcatgaaagtgtgacatcctgtctcacatgcaaattttttaaatcatcaatcaattaggtacttatatcaagactatgtaaaaaactcttgtgactcaataataaaaagacaaacccaattttaaaatgtgaagaagatctaaatagacattattccaaaaaacatacgtaaatgaccaataggcacattgaaagataacacaaacctataatccaagcactttgggaagcctaggcaggtggattgcttgagccaaggagtgtgacaccagcctggacaatatgaggaaaccccatctctacaaaaaaaaaaaaaaaaattcaaaaattagctaggtatgatggtgcacacctatagtcccagctactcaagacctgaggcaggaggatcacctgagcccggaaggttgaggctacactgagcccagatcgtgccactggactctaacctgagtgacaagaataagaatctgtctcaaaaaaaaaaaaagtataaagtaacacatcaatagtcactagagaaatataaaacaaaacaaaaaaataccaaaatgagataccacttcccacctattatgatggctaacatcaagaagacagtaagttggcagcaatgtggagaatctgaatgcttataatgtgctgctggaatataaaatggtacagctacttgggaaaacaactgatcagtttcttaaaagtgctgtgtaaatgtaccctattcctagtaattatactcctagatatatatacaatgtatgagatattaaggtatatgtccagacaaaaacttgctcaagtaaggtcactgtagcattattcataacagcaaaaaatgaaaacaacagaatcatcaagtgatgattagataaacaggtggtatgttcacagagtacttaaatgctcagcaataaaaaggagctactgatacacgcaacaagcccaatgagcctgaggtgaattacgctcagtgaaaaaaaaaactaatttcaacaggaaacacgctatatattcaatttctatatcataattcagaaataggggtaataaaagcatcctaaaattaagattgtgatgacggttgtaaaatcatttaaaaaatttttaagactgtaaatttactatcagtgaattaaatacttcagacaggtgaatttcatggtgcatcaattctacctcaataaagctgctaaaaattaatcttttcactacaatgagaataaaacaaagattaacagaaaacaaaatgtatgtgttcatgtatgtattattttcccttttatccctacattgtaaagagtattccaattatattggttatttcttttcaaaagtctaaaaaaaatattggctccaaagggtaccactctttatcattttttctcttcaaatgaaatggctaaacttccctaaaggaagttgaaatccttctcattccccaacggctcatataaatgtcctctccctcatgaaattcttcctgaactacaaaggaatccaacccctaatgaacattcgcagcactttctctgaaccattcttacagcagagatgtgaggctcttgccatcatcattttacaaacttttctctgttccatgagactccgagcactccagagccataatgcttatacacagttgtgtatcccctccccacccaaagctgtgtccaaaaatgccatgcctattcagtgacatcaggtcagttaatcctactcataatgcttgaagtgggggcagatctatgatcttacacagaaaacaagtagctgatctgaaaacaaaaaacaagtctctactttttcagctcaatcaacttttcttggattatataaatatctaagcaacccatctgaaaatgtcttacatcatattctcaaagaaaataaaagagaaaccattaaagtgtattaaaatctagcaaaatgggattaggaagccagccagctatcaaggaagcaaagcaatcactaatctagatgcttctttggctctaagagagatctgcagtaaaacaaaactaacaaaactacacatgaatacacaaaattaatgacagcataaatttaaatgaattgtgttatccaagaatttttaaaatatattaacataagctgaatattcaaatttatatgaataaacctttgatgggcacgaaggaagaaagctcctcacctcttaataatgaatgaaatcccggctgtgttctccaaaatccatttcagggttgcaagatagtaattctcagggtgtttaaaggcaacaccttctggaagcccctgtactatcaaagctgactggtcttgtagcatcttctcatatggtacagttacctctgtgggtttttgtaaagctttccctgggagaggtgaaaagcagataaatgtcattaaattgtaagattaaaaaacaaaatcatcactaccttattgtggcttaataaaggcatacgtgatcttttgtaatatgtgattttaaaattacttaataccatagcaccctattcgcatgtaagaagttctaaacctgacacctatccaaagggccaaaatgaaaagtatattaaatatatgacttcaaaaactacacaaaaggagagagaaatgtctgatttcttgcattattgtctttaagatggtcctaccctggcatatttcttgagttccttctaaatggaagtggaaagtaaggttattcctcatccattcagtttgtgaaaatgtgtgttataatactgttaagtcaatggcgtaacatagtctaccctttagaaaactctattatatcatgtttcttttataaaatttaagtgtatcgcttttaagatagcaaaagcagaaatagtcctcaactgttttttctgagtgttgccacttctacagcatctacactcatctgactcacctgggttgtagactttatttaatgcatctctgcaaccttttcttcttcttcaacacctgtaaaaaataataaaaatgtgcatacctattatcttaatatttatttggtttttagtaaaaatagtttttcctgtataccaatatttgtgatctgttatacaaacaaaaaataggtcaagtgaggtggctcacacttataatcccaccactttgggatgctgaggcagaattacttgagcccaggatttcaagactagcttgacaacacagaaacaacccatccctacaaaaaagataaataaaattaggtgtggtggtgcatatctgtagtcctagctaccctggaggctgaagcaagaggattgcttgagtccagaaatttaaggttatgatgagctataattacactactacactccaatctgggtcacagaaaatgaccctgtctcaaaaaaacaaacaaaaaggcgggaagattttttaaaggaaggttttaaaataaaaacctaaaataagagtaatttattggttataaacttaaatatgggaagattattatcaggaaacaaattctaggcttacaaagtctagcacaataaccaatagacacatgtgacacttgaaatgtggccagtccaaattcagatgttctgtaagtgaacaatacacattaacttttgaaaactcagcacaaaaagtattccaaatatcccattaataatttctatattgattacatattgaaatattttaaagtattgccactaaaatgattttcacttgtttctctatatttttaatattataactagaaagttttacatcatgtgaatgactcacattatatttagttctattcaatagcacttttctttaaatcccagaaaagggctcagaattctcctgaagaatttctacaacttcctcatgaacctattgattatgtttcagaagaacgctattgcaaacaaataaaaggtacttgagaattagttacaaaaaccattcttcatggtatcaaattagtaacaatgtaaacaaactacaaataccaataggcattggctacaactcacaactgaggacaactcccctaatgtttagttgcaatcactggagaaccatgtaagccatggagcacaggaaggggagaaaaacatagctgcctgcaagactgtggtatttgtggatcagagggcaggtgatacacacacaatcaaaacagcgttattagtataaagaaacatacaatcaaggacttaacatttctcaaaattataatattggcaaaatttaaaaaataagttactaccataaagcttggaagattataacacaggtggtgaggggagggatacagtggtgaggatagttttttttaagaaactaaaaatactactccgaataggaatagtgaattagcaaaatttttaattcactggtaatctgcacaatttatcatgaattgaatctaatctgacaacagaaatttaggtttaaaccttagtggcatacagacatctgtgggaggtactgtaggttcaattccagaccaccacaatcatggaagtataaagtgaagtcacacaaatgtctttgtttcccaatgcatttgaaagttatcttgaatctttctttcacaaaagatctctaggaggtatgatgctattggatagcattttacacacagtggaacttctttccaaatcagaatcaatcctccaaaagcctgccatggctttatgaagtaaatttatggaatattttaaatcttttgtcatttcaacaatattcacgacatcttcaccaggagtagactccatttcagagacccgtttctttgcacattgtaagaaagaactccttatctgttcacatttgatcatgaaattgcagcagttcagtcccatccacaggctccacttccttttttggggggaggcggggcagacagagtttcactcttgctgcccaggctggaatgcaatgacagtatcttggctcactgcaacctccgccccctgggttcaagcgattctcccaccccagcctcacaagtagctgggattacaggcatgcaccaccatgcccagctaatattgtatttttagtagagatgggctttctccatgttggtcagcctggtctcaaactcccgacctcaggtgatccacctgccttggcctccccaaagtgctgggattataggcatacagtggcaaagatagtttttttaagaaactaaaaatactactctgaataggaattaagagctgctgtgcccagccaacaggctccacttctagttctagttcacttgctgtttccactacatctgcagttccttcctccactaaaatcttgtaccctttaaagtcacctatgagagatggaatcaacatcttccacagtcctgtaaatgatattttgttctctcccaattaatcacaaatgttaatggcacctagaacagtaaaccttttccagaaggtttttaatttactttgcccagatccatcagaggaatcactctctggcagctgtggccttacaaaatgtatttctttctttttttcagatggagtcttgctctgttgtcagattggagtgcagtggtgcaatctcagctcactggaacctccgactccctggttcaagcaattctgcttcagaaacctgagtagctgggattacaggtacacaccaccacactcagctaactttcgtgtttttagtagagacagagtttcaccatgtttaccaggctggtctcgatctcctgaccttgtaatctgcctgcctcagcctcccaaattgctgggattacaggtatgagacattgcacccagcctataaaatatatttcttagagaataaaacttgaaggctgagtgcattggctcacatctctaatctcaaacactgaagaaggccaaggtgggcagattgcttgagtgcagaagtttgaaaccagcttaggcaacatggaaatttaacatctctaacaaaaaaaaaaacccacaaaaattagctgggtatgctggtgcaacacctgtggtcccagctattcagcaggccgaagtgggaggatcacctgatcctgagaagattgaggctgcagtgagctgtgattgtgccgttacattcaagtctgagcaacagtgaggtgaccttctcaaaaaagaaaaaaataaaaatcataagacttgaaattactcctagatccatgggctgcagaatggatgttgcataagcaggcatgaaaatgacattcatctccttgtacacatccatcagggctctcagagtgactgggtgcagtgctaatgagcagtaatattttgaaaggaactttttttctgggcagttggtctcaaaactaggcttaaaatattcagtgaacaggcatggagccaagatggctgaataggaacagctccaatctacagctcccagcatgagtgacgcagatgatgagtgatttctgcatttccaactgaagtactgggttcatctcaccacggattgttgggcagtgggtgcaggacagtaggtgcagtacactgagcctgagctgaagcagggtgaggcattacctcacccgggaagcacaaggggtccgggaattccctttcctagccaaggacagatggcacctagaaaatcgggtcactcccaccctaataatgtgcttttcagatggtcttcgcaaacggcacaccaggaaattatatcccacgccttgctcagagggtcctacaactacggagcctcactcattgctagcacagcaatctgagatcaaactgcaaggcggcagtgaggctgggggaggggtgcctgccattgctgaggcttgagtaggtaagcaaagtgtcagggaagctcaaactgggtggagcccactgcagctcaaggaggccttcctgcctctgttagactccaactctgggggcagggcatagccaaacaaaaggcagcagaaacctctgcagacttaaatgtccctgtctgacagctttgaagagagtagtagttctcccaacatgcagcttgagatctgagaacggacagactgcctcctcaagtgggtccctgacccccaagtagcctaactgggaggcacccccaagtaggggcagactgacacctcacacagctgggtactcctctgagacaaaacttccagaggtacaatcaggcagcaacatttgctgttcaccaatatctgctgttctgcagcctccgctgctgatacccaggcaaacagggtctggagtgggcctctggcaaactccaacagacctgcagctgagggtcctgactgttagaaggaaaacaaacaaacagaaatgacatccacaccaaaaccccatttgtacatcaccatcatgaaagaccaaaagtagataaaaccacaaacatgggggaaaaaaagaacagaaaacctgaaaagtctaaaaatcagagtgcctcacctcctccaaaggaacacagctcctcaccagcaatggctcaaagctggatggagaatgactttgatgagtagagagaagaaggcttcagacgatcaaactactgtccaagctaaaggaggaagttcgaacccatggcaaaaaagttaaaaaccttgaaaaaaagattagacgaatggctaactagaataaccaatgcagagaagtccttaaaggacctgatggagttgaaaaccacggcacaagaactacgtgacgaatgcagaagcctcagtagacgattcaatcaactggaagaaagggtatcagtgatgaaagatcaaatgaatgaaatgaagcaagaagagaaatttagagaaaaaagaataaaaagaaatgaacaaagcctccaagaaatatgggactatgtgaaaagaccaaatctacgtctgactgttgtacctgaaagcgacagagagaatggaaccaagttggaaaacactctgcaggatattatccaggagaacttccccagtctagcaaggcaggccaacattcaaattcaggaaatacagagaatgccacaaagatactcctcaacaagagcaactccaagacacataattgtcagattcaccaaagttgaaatgaaggaaaaaatgttaaaggcagccagagagaaaggtcgggttacccacaaagggaagcccgtcagactaacagctgatctctccacagaaactctacaagtcagaagagagtgggggccaatattcaacattcttaaagaaaagaattttcaagccagaatttcatattcagccaaactaagcttcataagtgaaggggaaataaaatactttacggacaaccaaatgctgattttgtcagcaccaggtctgccctaaaagagctcctgaaggaagcactaaacatggaaaggaacaactggtacaagccactgcaaaaacatgccaaattgtaaagaccatcgaggctaggaagagactgcctcaactaacgagcaaaataaccagctaacatcaccatgacaggaccagactcacacataacaatattaactttaaatgtaaatgagctaaatactccaattaaaagacacagactggcaaattggataaagagtcaagacccatcagtgtgctgtattcaggaaacccgtctcatgtgcagagacacacatagctcaaaataaagggatggaggaagatctaccaagcaaatggaaaacaaaaaagggcaggggttgcaatcctagtctctgataaaacagactttaaaccaacaaagatcaaaagagacaaagaaggccattacataatggcaaagggctaacaatttaacgagaagagctaactatcctaaatatatatgcacccaatacaggagcacccagattgatcaagcagttccttagagacctacaaagagacttagactcccacacaacaataatgggagattttaacacaccactgtcaacattagacagatcaacgagacagaaagttaacaaggatacccagcaattgaactcagctctgcaccaagtggacctaatagacatctatagaactctccaccccaaatcaacagaatatatattcttttcagcaccacaccacccctattccaaaattgaccacatagttggaagtaaagcactcctaagcaaacgtaaaagaacagaaattataacaaactgtctctcagaccacagcacaaacaaactagaactcaggattaagaatctcactcaaaactgctcaatttcatggaaactgaaaaacctgctcctgaatgactacagggtacataacgaaatgaaggcagaaataaagatgttctttgaaaccaacgagaacaaagacacaacataccagaatttctgggacgcattcaaagcagtgtgtagagggaaatttatagcactaaatgcccacaagagaaagcaggaaagatctaaaattgacaccctaacatcacaattaaaagaactacagaagcaagagcaaacaaattcaaaagctagcagaaggcaagaaataactaagatcagagcagaactgaaggaaataaagacacaaaaaacccttcaaaaaatcaatgaatccaggagctggttttttgaaaggatcaacaaaattgatagaccgctagcaagactaataaagaagaaaagagagaagaatcaaatagacgcaataaaaaatgataaaggggatatcaccaccaatcccacagaaatgcaaactaccatcagagaatattgtaaacacctctacgcaaataaactagaaaatctggaagaaatggataaattcctcaacacatacaccgtcccaagactaaaccaggaagaagttgaatttctgaatagaccaataacagactctgaaattgaggcaataattaatagcttaccaaccaaaaaaagtccaggaccagacggattcacagctgaattctaccagaggtacaaggaggagctggtaccattccttctgaaactattccaatcaatagaaaaagagggaatcctccttaactcattttatgaggccagcatcatcctgataccaaagcctggcagagacacaacaacaaaagagaattttagaccaatacccctgatgaacatcgatgcaaaaatcctcaataaaatactggcaaaccgaatccagcagcacatcaaaaagcttatccacccatcatcaagtgggcttcacccctgtgatgcaaggctggttcaacatacacaaatcaataaatgtaatccagcatataaacagaaccaaagacaaaaaccacgattctctcaataaatgcagaaaaggcctttgacaaaattcaacagcccttcatgctaaaaaatctcagtaaattaggtactgatgggacgtatctcaaaataatatgctatttatgacaaacccacagccaatatcatactaaatgggcaaaaactggaagcattccctttgaaaactggcacaagacagggatgccctctctcaccactcctattcaacatagtgctggaagttctggccagggcaatcaggcaggagaaagaaataaagggcattcaattaggaaaagaggaagtcaaattgtccctgtttgcagatgacatgattgtatatctagaaaaccctattgtctcagcccaaaatctcaagctgataagcaacttcagcaaagtctcagaatataaaatcaatgtgcaaaaatcacaagcattcttatataccaataacagacagagagccaaatcatgagtgaactcccatgcacaattgcttcaaagagaataaaatacctaggaatccaacttacaagggacgtgaaggacctcttcaaggagaactacaaaccactcctcaaggaaataaaagaggatacaaagaaatggaagagcctctccctctccctctccctctccctctccctctccctctccctctccctctctgtctccccacggtctccctctcatgcggagccgaagctggactgtactgctgccatctcggctcactgcaacctccctgcctgattctcctgcctcagcctgccgagtgcgcaggcacgtgctgccacacctgactggttttggtggagacagggtttcgctgtgttggccgggccggtctccagcccctaaccatgagtgatccgccagcctcagcctcccgaggtgccgggattgcagacggagtctcgttcactcagtgctcaatggtgcccaggctggagtgcagtggagtgatctcggctcgctacaacctacacctcccagccgcctgccttggcctcccaaagtgccgagattgcagcctctgcccggccgccaccccgtctgggaagtgaggagtgtctctgcctggccgcccattgtctgggatgtgaggagcccctctgcctggctgcccagtctggaaagtgaggagcatcttcgcccggccgccatcccatctaggaagtgaggagcgcctcttcccagccgccatcacatctaggaagtgaggagcgtctctgcccggccgcccatcgtctgagatgtggggagcacctctgccccgccgccccatctgggatgtgaggagcgcctctgcccggccgtgaccccgtctgggaggtgaggagcatctctgcccggccgccccgtctgagaagtgaggagaccctctgcctggcaaccaccctgtctgagaagtgaggagcccctccgcccggcagctgccccgtctgagaagtgaggagcctctccgcccggcagccaccccatctgggaagtgaggagcgtctccgcccagcagccaccccatccgggagggaggtggggggggtcagccccccgcccggccagccgccccgtccgggagggaggtgggggggggtcagcccccctgcccggccagctgccccgtccgggaggtgaggggcgcctctgcccggccgcccctactgggaagtgaggagcccctctgcccagccagccgccccgtccgggagggaggtgggggggtcagccccctgcctggccagccaccccgtccgggaggtgaggggcgcctctgcccggccgcccctactgggaagtgaggagcccctctgcctggccaccaccccgtctgggaggtgtgcccaacagctcattgagaatgggccaggatgacaatggcggctttgtggaatagaaaggcgggaaaggtggggaaaagattgagaaatcggacggttgccgtgtctgtgtagaaagaagtagacatgggagacttttcattttgttctgcactaagataaattcttctgccttgggatcctgttgatctgtgaccttacccccaacccggtgctctctgaaacatgtgctgtgtccactcagggttaaatggattaagggcggtgcaagatttgctttgttaaacagatgcttgaaggcagcatgctcgttaagagtcatcaccaatccctaatctcaagtaatcagggacacaaacactgcggaaggccgcagggtcctctgcctaggaaaaccagagacctttgttcacttgtttatctgctgaccttccctccactattgtcccatgaccctgccaaatccccctctgtgagaaacacccaagaattatcaataaaaaaaaattaaaaaaaaaaaaaaagaaatggaagaacgttccatgctcatgggtaggaagaatcaatatcgtggaaatggccatactgcccaaggtaatttatagattcaatgccatccccatcaaggtaccaatgactttcttcacagaattggaaaaaactactttaaagttcatatggaaccaaaaaagagcctgcatcaccaagtcaatcctaagccaaaagaacaaagctggaggcatcaaactacctgacttcaaactatactacaaggctacagtaaccaaaactggtaccaaaacagagatatagaccaatggaacaggtagagccctcagaaataatgccacatatctacaactatctgatctttgacaaacctgacaaaaacaagaaatagggaaaggattccatatttaataaatggtgctgggaaaactgactagccatatgtagaaagctgaaactggatcccttccttacatcttatacaaaaattaattcaagattgattaaagacttaaacgttagacctaaaaccataaaaaccctagaagaaaacctaggcaataccattcaggacataggcacgggcaaggacttcatgtctaaaacaccaaaagcaatggcaacaaaagccaaaattgacaaatgggatctaattaaactaaagagcttctgcacagcaaaagaaactaccatcagagtgaacaggcaacctacagaatggaaggaagtttttgcaatctactcatttgacaaagagctaatatccagaatctacaatgaactcaaacaaatttacaagaaaaaaacaaacaggatagcattaacaaaacaaacagggagggatagcattagaagatagatacctaatgttaaatgatgagttaatgggtgcagcacaccaacatggcacatgtatacgtatgtaacagacctacacgttgtgcacatgtaccctaaaacttaaagtgtaataataataaaaaaattcagtgaacaatgctataaagagatgtgctgtcatccaggctttattcttctgttgatagaacacatgcagagcagatttagcgtagctcttaagggccctagaatttttggaatggtaaatgagcattggcttctattaaagtcaccagctgcattagcctctaacaagagtctcagcctgtcctttgaagctttgaagccagtaatggaattctctctagctagcaaagtcctagatggcatcttccaatataaggctgttttgtctacattaataatctgttttttgagtgtagccatcttcatgaattatctcagcgagatcttctgaagaactcacagttcttacatcaagcacttgctgcttcaccttgcacttttatattatagagactgtgtctttctttaaacctcatgagccaacctcagctagctttcagcttttcttttgtagcttactcacctcctctcagccatcacagaactgaagagagttagggccttgttctggattaagctttgacttacaggaatgttatggcccatttgatcttctattcagaccaaagtttctcggtatcagcaacaaggctgttttgcttttttatcatttgtgggttcactggagcagcacttctcatttccttcgataacttttcctgtgcattcaccacctggccaactgtttggcctagctttcaactgccaacatgtcttcctcactaagcttcttcatttttaacttgatttaaagtgaactgactgcaactccttcttttacatgaacaattagaggccactggagggctattaactggtctcacttcaatattgtgtctcagggactagggaggccttaggagaggaagcaatgggaaacctcctcattggtggagcagtcagagcagacaacatttaccaatgaggtttgccatcttacacaggtgtgttcatggagtccaaaacaattacaacagtaacatcaaagctcactgatctcaggtcaccacagcacatataataatcatgaaaaagtttgaaatattctaagagtaaccaaatgtgacacagacaaccaaagagagcacatgctgttggaaaaatggcacaacggacttgcttgacacaagattgccacgaatcttcaatttgtaaaaactgcagtatctgcagggctcaaaaaagttgagttatgcctggatgtattctgtgcctatagacgccctgccttttttgttccctttcagtgtttccctcagttaacatgaaacctatcgatagtgttaggttacacacagatatgaaagttgtcatactgtgaaaaggccataagtattaacaccctatagtaaattttaatactctgttccaatgtcagataagctcactgctctaaacaaggattgcaaaacccactgaagattcagataaggtgattccactgagcgagttgaggagaactgtttaattctgcatcatgcttaaacaaacttctctgcacagtgaatttcttgtttgcagttcaccaactttatctagaattccttatctgactaagaactattcaaaaattctctcccttcattaccttctctctaatgcatctcattaatccagagtgaagccaagcaaggagccccatacaatcaacacttgccattgttcttaactcttcagtatccaccgtgacatattacgacttcggtgattccttttgagcattttgaaatgtctgcataaacatttcagaaaatcattcatagtttaggccgtgcacagtggctcacacctgtaatcccagcactttgggaggccgagtggatcatttgaagtcaggagttcaataccagcttgaccaacatggtgaaaccccatctctactaaaaatacaaaccaaaaaaaaattagctgggcgtggtgccacgtgcctgtaaccccagctactcaggaggctgagacaggggatttgcttgaactcaggaagcagaggttgtgtgagccgagaccttgccactgcactccagcctagacaacagaatgagattccatctcaaaaaaaaaaatttttttttatagtttaaacctcattctgctttagaagaaaatatgactagtcttatctataaatatttaggttgaaaatcaatgaaataaaaatgataaaaacacaatgcttgcaatattttacaaaatctgtttgaaaatcctttctggtattgaaaaaattgtgtcctctgtccttcagttccgaaggcaaagacatctgctttatactcagtgatgcaggcccctttggccttaaacttggccagttctttcaactacaataagcacagcaaatattatgttaaaggcagatatttaaaatcaccatttctgctaggtgaatgaaaaaaaatctagcacaaggctgagcacagcgcctcacgcctgtagtcccagcactttcggaggccaaggtgggaagatcatgaggtcagcagtttgagaccaggctggccaacatagtgaaaccctgtctctactaaaaatgcaaaaataataataatactaataataaataaataaataaaaggctgggtgtggtagctcacgcctgtaatcccagctacttgggaggctgaggcaggagaatcacttgaacctgggaggcagaggttgcaatgagtagaaattgtgccaatgcactccagcctgggtgacagtgcaggactctgtctcaaaaaaaaaaaaaaaaaaaaaaaaaaacctaacaccattttttaaagttactactctttctaaatagatttttgcctgattttaaaaaaaagacagcacaaaatttataagaaaaaaaatgcagaaatcccttataatctattattggtcagattctccaagaaagagactgagatttcacacaggcttgctggggagcactgtcaataacagcacccaggaggtgggaggcaggcatggatgaacaggcaaagtgctgaacagggatgcagctgcaccaacagctcagaagccagtgtggtcctccccagggaaaaggtggacaaggtgactcgaacactcacagcagctggggaacttagcgccatctgctgaaacccagatgaaacccacactatagcattcagtacataatcccctcctccagaaatcctcctccccatctacacatagccagaatcacatttagatgattatttactgaatttcactaagtatatttctctgagagtcaatattctttaaaaacattatagagtacgtagtactccatttcatggatacaccataattcctttagtgcttacattatttcaaaggtcagtgattccaattttccctcttaaaaataacactaccgtaataacctgggaagaaaatatttatgtacatattcaatgattttctcaaaaaagacatgaaagtcaagaaaaaccaccattgagagtcaatactccaaatactcaaaatctactgaaatttgctttctaataaggttcataatatcctagcaaatgttaccatgtgacttttccagaaaccttgaaaaagggtatcttagactcattaaaatactccactgattggtgttaaaattaaagagtatcgtagcataattttctgccaattaccatatcctttgcctatttttcaaatgtgttagtgtatatctgactaacccataaaattacatcacttattttaggcatagaaaagccatttacggaattaaataattatataataattacatatattttgttttggttttaaaatttgtcttagtataactatttttgcttatctataatttaactcatcacatgacgaagactatacgttgaagctttttttttttatactttaagttttagggtacatgtgcacattgtgcaggttagttacatatgtatacatgtgccatgctggtgcgctgcacccactaactcgtcatctagaattaggtgtatctcccaatgctatccctccccactccccccaccccaccacagtccccagagtgagatattccccttcctgtgtccatgtgatctcattgttcaattcccacctatgagtgagaatatgcggtgtttggttttttgttcttgcgatagtttactgagaatgatgatttccaatttcatccacgtccctacaaagacatgaactcatcattttttatggctgcatagtattccatggtgtatatgtgccacactttcttaatccagtctatcattgttggacatttgggttggttccaagtctttgctattgtgaataatgccgcaataaacatatgtgtgcatgtgtctttatagcagcctgatttatagtccattgggtatatacccagtaatgggatggctaggtcaaatggtatttctagttctagatccctgaggaatcaccacactgacttccacaatggttgaactagtttacagtcccaccaacagtgtaaaagtgttcctatttctccacatcctctccagcacctgttgtttcctgactttttaatgatggccattctaactggtgtaagatggtatctcattgtggttttgatttgcatttctctgatggccagtgatgatgagcattttttcatgtgttttttggctgcataaatgtcttcttttgagaagtgcctgttcatgtcctttgcccactttttgatggggttgtttgtttttttcttgtaaatttgtttgagttcattgtagattctggatattagccctgtgtcagatgagtaggttgtgaaaatattctcccattttgtaggttgcctgttcactctgatggtagtttcttttgctgtgcagaagctctttagtttaatgagatcccatttgtcaattttggcttttgttaccattgcttttggtgttttagacatgaagtccttgcccatgcctatgtcctgaatggtaatgtctaggttttcttctagggtttttatggttttaggtctaatgtttaagtctttaatcaatcttgaattgatttttgtataaggtgtaaggaagggatccagtttcagctttctacatatggctagccagttttcacagcaccatttattaaatagagaatcctttccccattgcttgtttttgtcaggtttgtcaaagatcagatggttgtagatatgcggcactatttctgagggctctgttctgttccattgatctatatctctgttttggtaccagtaccaggcagttttggttactgtagccttgtagtatagtttgaagtcaggtagtgtgatgcctccagctttgttcctttggcttaggattgacttggcgatgcgggatcttttttggttccatatgaactttaaagtagttttttccaactctgtgaaaaaaggcattggtagcttgatggggatggcattgaatctgtaaattaccttgggcagtatggccattttcacgatattgattcttcctacccatgagcatggaatgttcttccatttgtttgtatcctcttttatttccttgagcagtggtttgtagttctccttgaagaggtccttcacatcccttgtaagttggattcctaagtattttattctctatgaagcaattgtgcatgggagttcactcatgatttggctctctgtttgtctgttgttggtgtttaagaatgcttgtgatttttgtacattgattttgtatcctgagactttgctgaagttgcttatcagcttaaggagattttgggctgagacaatggggttttctagatatacaatcatgtcatctgcaaacagggacaatttgacttcctcttttcctaattgaataccctttatttccttctcttgcctgattgccctggccagaacttccaacactgtgttgaataggagtggtgagagagggcatccctgtcttgtgccagttttaaaagggaatgcttccagtttttgcccattcagtatgatattggctgtgggtttgtcatagatagctcttatgattttgagatatgtcccatcaacaccaaatttattgagagtttttagcatgaaggttgttgaattttgtcaaaggctttttctgcatctattgagataatcgtggtttttgtctttggctctgtttatatgctggattacatttattgatttgcatatattgaaccagccttgcaacccagggatgaagcccacttgatcatggtggataagctttttgatgtgctgctggattcgttttgccagtattttattgaagatttttgcatcaatgttcatcaaggatattggtctaaaattctcttttttggttgtgtctctgcccggctttggtatcaggatgatgctggcctcataaaattagttagggaggattccctttttttctattgattggaatagtttcagaaggaatggtaccagttcctccttgtacctctgatagaattcggctgtgaatccatctggtcctggactctttttggttggtaagctattgattattgccacaatttcagatcctgttattggtctattcagagattcaacttctccctggtttagtcttgggagagtgtatgtgtcgaggaatttatccatttcttctagattttctagtttatttgcatagaggtgtttgtagtattctctgatggtagtttgtatttctgtgggatcggtggtgatatccccattatcattttttattgcatctatttgattcttctctttttctttattagtctttctagcggtctatcaatcttgttgatcctttcaaaaaaccagctcctggattcattaattttttgaagggtttttttgtgtctctatttccttcagttctgctctgattttagttatttcttgccttctgctagcttttgaatgtgtttgctcttgctcttctagttcttttaattgtgatgttagggtgtcaattttggatctttcctgctttctcttgtgggcatttagtgctataaatttccctctacacactgctttgaattcatcccagagattctggtatgttgtgtctttgttctccttggtttcaaagaacatctttatttctgcctttatttcgttatttacccagtagtcattcaggagcaggttgttcagtttccatgtagttgagcggttttgagtgagagtcttaatcctgagttctagtttgattgcactgtggtctgagagatagtttgttataatctctgttcttttacatttgctgaggagagctttacttccaagtatgtggtcaattttggaataggtgtggtgtggtgctgaaaaaaatttgtattctgttgatttggggtggagagttctgtagatgtctattaggtctgcttggtgcagagctgagttcaattcctgggtatccttgttgactttctgtctcgttgatctgtctaatgttgacagttgggtgttaaagtctcccattattaatgtgtgggaatctaagtctctttgtaagtcactaagcacttgctttatgaatctgggtgctcctgtattgggtgcatatatatttaggatagttagctcttctagttgaattgatccctttaccattatgtaatggccttctttgtctcttttgatctttgttggtttaaagtctgttttatcagagactaggattgcaacccctgcctttttttgttttccatttgcttggtagatcttcctccatccttttattcagagcctatgtgtgtctctgcacgtgagatgggtttcctgaattcggcacactgataggtcttgactctttatccaatttgccagtctgtgtcttttaattggagcatttagtccatttacatttaaagttaatattgttacgtgtgaatttgatcctgtcattatgatgttagctggttattttgctcgttagttgatgcagtttcttcctagtctcgatggtctttacattttggcatgattttgcagtgactggtaccggttgttcctttccatgtttagtgcttccttcaggagctcttttagggcaggcctgctggtgacaaaatctctcagcatttgcttgtctgtaaagtattttatttctccttcacttatgaagcttagtttggctggatatgaaattctgggttgaaaattcttttctttaagaatgttgaatattggcccccactctcttctggcttgtagagtttctgctgagagatccgctgttagtctgatgggcttccctttgtgggtaaccggacctttctctctggctgcccttaacattttttccttcatttcaactttggtgaatctgacaattatgtgtcttagagttgctcttcttgaggagtatctttgtggcgttctctgtatttcctgaatctgaacgttggcctgccttgctagattggggaagttctcctggataatatcctgcagagtgttttccaacttggttccattctccccatcactttcaggtaccccagtcagacatagatttggtcttttcacatagtcccatatttcttggaggctttgctcatttctttttattcttttttctctaaacttcccttcttgcttcatttcattcatttcatcttccattgctgataccctttcttccagttgatcacatcggctcctgaggcttctgcattcttcatgtagttctcgagccttggttttcagctccatcttcttatacattcttctaaatttttttcaaagttttcaacttctttgcctttggtttgaatgtcctcctgtagctcagagtaatttgatcgtctgaagccttcttctctcagctcgtcaaagtcattctccatccagctttattccgttgctggtgaggaactgtgttcctttggaggaggagaggcgctctgtgttttagagtttccagtttttctgttctgttttttccccatctttgtggttttatctacttttggtctttgatgatggtgatgtacagatgggtttttggtgtggatgtcctttctgttagttagttttctttctaacagacaggaccctcagctacatgtctgttggaataccctgccgtgtgaggtgtcagtgtgcccctgctggggggtgcctcccagttaggctgctcaagggtcaggggtcagggacccacttaaggaggcagtttccccattctcagatctccagctgcgtgctgggagaaccactgctctcttcaaagctgtcagacagggacatttaagtctgcagaggttactgctgtctttttgtttgtctgtgccctgctcccagaggtggagcctacagaggcaggcaggcctccttgagctgtggtgggctccacccagttggagcttccgggctgctttgtttacctaagcaagcctgggcaatggctcccctcccccagcctcgctgccgccttgcagtttgatctcagactgctgtgctagcaatcagtgagactccgtgggcgtaggaccttcccagacaggtgcaggatataatctcgtggtgtgccgttttttaagccagtcggaaaagtgcagtattcgggtgggagtgacccgattttccaggtgcgtccgtcacccctttctttgactctgaaagggaactccctgaccccttgcacttcccaagtgagacaatgccttgccctgcttcggctcgcacacggtgcgtgcacccaatgacctgcacccactgtctggcactccctagtgagatgaacccggtagctcagatggaaatgcagaaatcactcacgctgtgaggtgtagaccggagctgttcctattcggccatcttttgccttcatccttgaagcttgtttttaccaaaatttttattttttaccaaatagcctattttctcagtatcatttgttgaaaaccataagctttccactatttatttttgatttgtacaataatctccctctaatttcttaactggagattatttctgcataatattgctttaaaatgttatcttcagtaactaatttagcaactggtgaggtgatcgaaatcttttgagttataataaagtcatggtagagaacttctgacctggaggtgggccgagagctaccccagcgtgaagcttgatgggccttggtaatttccttccattgcacttacttgacttgtgatgtggctactctcctataaggaactattatttacttaccttgagtaaatgagcgtacattcttgcttcactatccacactctaaaacaatcctgtcaacaaaggcaatggttatgaaagagtaagcaagattcatgtactatccatagattaaagaagtctaccagccaaggaagggacaaagtcagcctggatctgcttagcactctgacaagccagtgaagaactcagcagtttctacacctttaattatactgtgttatatacaactaggaatagaaggagaaatggtcttactaatgctgggaaggaagaaataaaggctgagaatagtgaaatgactatgccaaacatgaaagaactataaagaaattctaaggaagtgaatgggtcttacgtggtcctatggtactctttgcagagatcaatattttcaaaaattattttattgtcggccaggcatggtagctcacacctgtaatctcagcactttgggaggccaaggtgggtggatcacgaggtcaggagatcgagaccatcctggctaacactgtgaaaccccgtctctactaaaaatacaaaaaaaaattagccgggcatggtggtgggcccctgtagtcccagctactcgggaggctgaagcaggagaatggcatgaacccaggaggtggagcttgcagtgagccaagatcatgccactgcactccagcctgggcaacagagtgagactccatctcaaaaaaaaaaaaaaaaaaaaaaaaagagagaccagcctgggcaatatattaagatttcatctccactaaaaagcgaaacaaagtagccagacgtggtagtacatgcatacactcccagctactccaaggcggaggtgggaagaccacttggacccaggatgtccaggctgcagtgagccatgattacacaactgcattccaatctggacaaaagggtaagaccctttctccaaaaaaaaaaggtaaataaaaaatagaaaatacctaagcctgatactttttataataagtactatttccagctacatacccataaaaatagaaaataattatataaataccatgatagtaatataaaaatacaaaactacataattggtactcaatatttcactataattatgcatatgataggctttttttttttaaagagctggccaggtgcggtggctctcacctgcaatcccagcaatttgggagtccaaggcagacagatcacttgagctcagcagttgaagacaagcctcaccaacattgtgaaaccccatctttagcaaaaaaatacaaaaattagctgagtgtggtggcacacatctgcagccccagctactagaaaggctgtcatgagaatcacttgatcctgggaagcggaggttgcagtgagctaggatcgcaccactgcactccaccctgggtgacagagtgagactctgtcaaataaaataaaataaacagctaacactaaacaatttagaaagaggtggttagtgcaatagtgaatgtgtaagcagaagaaatatacatacacaatagtaaagatgccttaatgaccccgaattctgggagtcttctacatatagatacaataaaactccagcaccatactctaggatacaaactcattctgagtaaccacaaatattatacataatttcaaaacacttgcaaaacaaatgattgcctaaaataatggtagaaaattatttgacattcaatgtaaaaattaaacattctgaagcatggtaataaaatgtgatttgaaaggcataactgctattcaagaaaaaaaaactactccttaaaaccaaaaaaatacgtacaattatatcttctacaaaaacaaatcaaccttaactacagtccagttctacccaactatggaatgtcagaatagaaggtctcaccatggactcaagagctgacatgaggaatgtcaccaccatcctgctgaggactcctcatcttcaacggccagggcggacattgttacttgggccatgatctttgtgcaagacaagcaataagaaagtgagtggtagaaatatggtgttccagacccacattcagagctctgaggatctcccactggctgcctaatttactgttttcttgcctaagaaaaaaaacaagactcaaaaactacatgatttgcccaaaactctcatcggatagagaatctatcccctaactttctatctagtgttatttcaataaaattgggttaatataaacacccaaaagaaatgcagatggcactcagaatcagtgaaatttctctcaagaaggaggaggaggagagatgctttacaacccagtgatggactatcacagaccaaggcaggacagagctgccaagctccctctctcccctgcacatcctgatacagcaaagggtgggtgcagtggactgaggctgggtggagagaagtttctcttcttaccgagaaaatagatcacaagcatcaagaaacaagtaagattatttattattacagcatatggctgtatttgaaaaactttttgtaatattttggtaacaataaagaccctcaaatgaatttcaaacactataaatattcaacacatacacagaaaacattaactgtcagcaaggatattgaaaaactggaccctttatgcaccgctgtttggaatgtaaactggtgcagcccttgtggaaaacggtttggcagctccttaaaatattaagcacagaattatcacataatccaacaactgccattcaggttatatacccaaaagaattgagagcaaggactcaaatgggtatttgtacactcatgttcatagcaacattattcacaatggccaaaaagtacaaccaaccctaatgcctatcaacaggtaaatggagaagcaaaattgtacacacaaacatggaatattattcacctgtgtaaagaaaaaacaattctggccaggttcggtgacttacccctataatctcagcactttgggaggccaaggcaggcagatcacttgagtccagaagttccagatgagcctgggcaaaatagcaagacctcgtttctgtaagtttttttttttttaagaaaattctgataatgctatagatgaaccttgatagcactatgcaatctatgcatgcaacaaaattgcacttatactccacaaatgtatgtaaggttgttttaaaatggggaattcatcaaggaagaaacatgacccacagagaggagacagaaaagccaccaacctctgaattggtgagtagccaaggggggctccccacccaaggaaaatagtgagtaagcaagagccactggtgactcacccttctgccatcgacttttgaaatcctgggcacagaaaatcccctgacaccctccccacagggctccccaactgacacagagagctgcatggagtctgggcagagcctccagtcaggcccacataaaaccctaagggccttggacccctgagcaccacagtgccagctgctatagctctgccaccagaagaggccagactctctcacatgcccccaggataggggccatatctacagtgctgaggagtagacagactcacctcccgtagaggcctcacctccactacaccttgcctggtaatgcccactggcctgggtcccagtgcagccacttaccccctgcctgagcactcaggctaattgcaactctgcagacagacctcctagaagtaactgtcaggcctgctgtttctgcaattgtcatggcccctgcgcctctacctctctcaggctagggagggactgaagagcccaagaactatcataggcttctagcacaccacagctgccttgcagaaagtgggcaaactgttttccacgtgggtccccctccctgctgcacctcactgggtagggtttcctgacctgggctcccagcacagccatcctgccccttccaccaggagggattgcttcagtcagtggcatctctgcatctctctgagatggagctttcaggggtaacccacaggctctctgccattgccactttagcaataccaccattgctgcccttggtatgggcaaagaataaagaccctgattgctttgccagcacctccagtgtaccacagccaccagatggagagaagtccagtttctcttttctgtgagattctggctccctgcttttcaccagacggagccccaggtttaagcccacagttcggccacctcacctttggctgaagattctcattggcagtggctctgcatctctctggggtggagttcccagaggcagcccttctgccattactactgcagtgatactgcccttgctgcccccaggctggggaagaaacaaagtgcctgagtgctttgctcacacctccagcaggccacagccaccatatggagggaagcccagtctctcttcccagttggccccaaatgccctgctcttcaccaggcaggggtcccagcttgggcccacaatgcagctgctccatttctgactgatcattctgattggcagcagctctgcatgtctctgacgtggtaccctaagagacaagtgaaaggctttctgccattgccattgccaagttccccaatgctgctgttcccaagctgcggagaaaatgaaaagcctgagttcaccccagagctatggtgcacaaggctatgggataggactgccaagccaagacctatggcttaagtggaggaccagcataaaatcgctgaaatgacagagaattcagaacctggatgccaatgaagatcatcaagattttgaagaaagttgaaacccatttcaaggaatctaaaaaattcagtaaaactattcaagaggtgagagatgaaatagccttcttaagaaggaacaaaactgatctgatggagctgaaaaactcacaaaaataattttgtaatacaatcagaaatattaacaccagatgagaccaagctgagggaagaatctcagagctcaaagaccagttctttgaattaattcagtcagacaaaaataactgtaaaagattgtttttcatgaaaaaaaacctttgagaaatatgggattatgtgatgacaccgaatctacaactcattggcatctctaaaagaaaggaagaaagaacaagtaacctggaaaacattttttaggatactatccatgagaattttcttaactttcctagagaggttgaaattcaaattcagaaaattcaggggacccctgggagatagtacacaagataaccatccccaagacattcagtcatcagattctccaaggtcaatgtgaaagaaaaaatattaaaggcagctagagacaagggtcaggtcacttacaaagggaactccatcaggttatgagcagacattccagcagaaaccatacaagcaagacaaaagcaattgggggacctatattcatcattctcaaagaaaacaaactccaaccaagaatctaatcacaccaaactaagcttcataaacaaaagataaaagatatcctttcagacaagcaagataattcattaccaccaaacctgccttaaaagagattcttacgggtgtgttaaacatggaaaggaaagactattactggccaccacaaaaaacacactgaagtacatgggctatttacactacaatgtaaatacacaatcaagtttacgtaacaaacagctaacaacacaatgtcaggatcaaatctccacttatcaatattaaccttgaaaaagaatgtgctaaataccccactgaaaaggcacagagtgacaagttaaataaagaagcaagacccaactgtatgctgtcttcaagagacccatctcacatgcaacaacatccacaggctcaaagaaaacagatggagaaagatctaccaagcaaatagaaaacaaaaaagagcagaagttactattcttttttcagacaaaacagactttaaattaacaatgatcaaaaaagacaaagggcatttcatgataaggggttcaattcagtaagaagacttaactatcctaaatgttaattatatacacccaacactggagcacgcagattcataaaacaaattcctagagacttatgaagagacttagataaccacacaataatactgtgagactttaaaaccccaccaaaagtactggacagatcaccaaggcagagtacttacaaagatatttaggacctaaacttgacacttaaccaaatggacctaacagtcatctacagaacactccagccagcaaaaccagaatatacattcttcttatctccacatgacacatactctacaattgaccaccacacacttggccataaggcaactcacaacatattctaaagaatcaaaatcataccaaccacactatcggaccacagtgcaataaaaatagatatcaataccaagaagacctctcaaaaccatacaatttaataaaaaattaaataagtagctgctggatgacttttgggtaaagaataaaataaaggctggaatcaagaaattatgtgaaactaatagaaacaaaaatacaacatacctaaatcactgagaaactatttttaaaaaagtgttaaagggaaagtttgtagcactaaacacccacattaaaaagttagaaagatatcaaattaagaacctaacattgtatctttttatttatttatttatttttgagacagagtcttgccctgttgcacaggctggagtgcagtggagcaatctcagctcactgcaacctccatctccctggttcaagcaactctcctgtctcagcctagctgagactacaggcgtgtaccaccacgcccaattaattattttatttttagtagtgatggggtttcaccatattggtcaggctggtctcgaactcctgacctcaggtgatccacctgcctcggcctctcaaagtgctgggattacaggcgtgagccactgcaccaggcgctatctagcagaaacagaaatgtaaccacaaatcaacctcaaagctagaagacaaaaaatatcaaacagaatgaaatggagatttaaaaaactggacaaaaatccagtgaaacttatttctgaaataataaataagattgatagactgctagctaaaggaaaaaagatgatctacctaaacatgataaaaagtgacaaaggaaatactatcactgatgccacagaaatacatgaaaccattagagactattatgaacacctttatgcacgcaaactagaaaacacagaagaaatggataaatacctggaaacatataaactcccaaaactgagccaggaagaaattaaaaccatgaaaagaccaatactgacttctgaaattgaataaataataaaaagcttacgagaaaacactctggaccagatggattcacagccaaattctaccagacatataaagaagagctagtaccagttctactgaaactattccataaaaaggaggaggagagacttcctcttaactcattctatgaggccagcatcattctgacaccaaaacctagcagatatggaacaacaacaaaaaaaaaagcaaattgggctgggcatggtggctcatgcctgtaatcccagcactttgggaggcagaggcgggcagatcacctgaggtcaggagttcgagaccagcccggctaacatggtgaaactctgtttctactaaaaatacaaaaaattagctgggcttggtggcacaggcctgtagtcccatctactcgggaggctaagacaggagaatccgttgaacacaggagtggaggttacagtgggccgagatcatgccattgcactccagcctgggcaacaagagtgaaactccatctcaaaaaatatatatatataaatatatttatgtaactataaatgtaaatatatataaactgaatccagcatcacatcagaaaagctaatccaccatgatcaggtaggctttattcctgggatgcatggtcaaacaccctcaaaaactaggcatcaaaggtacgtacctcaagataataacaaccatctataacaaacccacagtcaacatcatactgaaagggcaaaagcttgaaacattccttttgagaaccagaacaaaacaaggatactcacgctcactattcctattaaatactggaagtcccagccaaagcaatcaggcagaggaaagaaataaaagtcatccaaataggaagagtggaagtcaaatgatttcatttcacaaatgatataattctatacttagaaaagcccacagtctctgcccaaagactcctagatctgataaagaacttcagtaaagtttcagcatacaaaataaatgtatgaaaatcagtaacatttctatacaccaataacatctgattgaaaatacaattctattcacaatagccaccaaaagaataaaatacctggaaacacagctaaccaggaaggcaaatgatctctacaaagagaattatgagctattgttaaaaaaaaaaattagagatgacaaaagcaaacagaaaaacattccatgctcatggataggaagaatgaatattgctaagatggccatactaccaaaagaaatttacttttgaattccatgttattcctaacaaactaccaacaacattttttatggaatttttttaaaaatgaaaaaacttatttgaaacaaaaaaaaagagcctgaatactcaaagctattctatgcaaaggaacaaagctggagtcatcatactacccaacttcaaactatactacaaggctacaatacctaaaagagcatggatactggtacaaaaatagactcacagaccaaaggaataggctagagaacccagaaataaaaccacacatctaaaaccatctgatttttcacaaagccaacaataacaaacaataaggaaaggactgcccatcaggcatggtggctcatgcctgtaatcccagcactttgggaggccaaggcgagtggaccacctcaggtcaggagtttgagaccagcctggccaatatgataaaatgccatctatactaaaattacagaaattagccgggcgtggtggagggtgcctgtaatctcagctactctggaggctgaggcaggagaatcacttgatcacttgaacctgggggaggttgcagtaaactgagatcataccattgcactccagcctgggcaatgagtcaaactccatctcaaaaaaaaaaaaaaaaggaaggaaaagactccctgttcaataaatagtgctgggataactggctagtcatatgcagaagattgaagatggaccgcttcatttataccatatacaaaaattaactcaagatggattaaagacttaaatataaaacctaaaagtgtaaaaaccctagaagaaaacctaggaaataccatgctgtacattggccctggcaaagacttcaaagactctaaaagcaactaaaacaacaagaagttgataaatgagaccggattaagctaaagagcttcagcacagcaaaagaaactaccaacagagtaaacacacaaccaacagaatgagaaaaaaaacttgcaaactatgtttttcagcaaaggtttaatatgtagaatctatttaaaaaatcataattcacttagcaaaaaacaaactttattaaaaatgaataagaacatgaacacttctgaaaagaagacacacatgcatccaacatgcatattaaaatgctcaatatcactaaccattagaaaaatgcaaatcaaaaccacaagataccatctcacatcagtcacagtagccatattaaaaaggcaaagaacaatagatgctagtgggcagtgaagagaaagcttatacactgctagatggaatgtaaatttttccaggcactgtggaaagttctctggagatttctcaaagaatttaaaacaaaactaccatctgacccggcaattccattatttggtatatagccccaaaatagaaatcattcaactgtaaagacacatacatgcttatgttaatcacagtactattacaatactatttacaatagtacaagtactagtactactgtactagtacacagtactatttacaatagcactaagtactagtactgctgtaccagtacacagtactatttacaatagcactaagtactagtactgctgtaccagtacacagtactatttacaatagcactaagtactagtactgctgtaccagtacacagtactatttacaatagcactaagtactagtactactgtaccagtacacagtactacttacaatagcactaagtactagtactactgtaccagtacacagtactacttacaatagcactaagtactagtactactgtaccagtacacagtactacttacaatagcactaagtactagtactactgtactagtacacagtactacttacaatagcaaagacatggaatcatcagatgtccttcaataaacaaatggattttgcaaatgtggtgtgtgtgtgtgtgtgtgtgtatatataatttcattgtgtatatataacttcattctttatatttcattgtatatacaatttcattgtgtatatatttcattatatatatataatgtaatatagatgtatattacacaataatatacacaatcgtatttcattgtatatatatttcattttatatatatacacgcatgcaatgaaacagtattcagccataaaaagataaaattccgtcctttgtagcaacagggatgaacctggaggtcattgtgttaagtaaaataagccaggcataaaaaaaaatactgcacattctcactaatacatagaatctaataaagttgatctcatagaagtagagagtagactggtgattactagaagctagggtgtgtaagagtggaaatgagagaagcagctagggtgggttgatatggaaatgagtgaagaggctagattagccacaatgtatatgagataatcagagttaaccaaggagtgggtaaaattaaaatgatcatggtaattatttagagcactaaagaacaaacattgataatgtgagatctgttgttttttcccagatacatgaaacacatttctttgttattaagatgaacatactttaagcataatgcttgttatgcttaaaaataccttttgttagcgggccgtggtggctcacgcttgtaatcccagcaccttgggaggccgaggcgggcagatcacgaggtcagatcaagaccatcctggctaataaggtgaaaccttgtctctactaaaaatacaaaaacttagccgggcgtggtggtgggtgcctgtagtcccagctacttgggaggctgaggcaggagaatggcctgaccccaggaggcagagcttgcagtgagctgaaatggtgccactgcactccagcctgggcaacagagcgagactccgtctcaaaaacaaaaaaccttttttcccaagctgccattggacttttagccaacacctttttcctcttgttcaacatcttcacatttcttcagaatcagaaatcgaagccccatgacctcatcagctgtaactcggccttcattcatgtagtgatattcctcactgtggtagacggttggcctccagatatgcttgaatcactgcacttagggaatgagttcaaatgtaagtccttgtcctacataaacagagtgacgacgggcctgtgtaacacctgtctcctgagtgtacaccaggccagcaccatcagccccagcaactgctgtttggcaaggcttaaacagaaattcacaaatatcgttatcagtgtcattttttttttggtccgtcaatttttctttcagtcataacataatattcttcactgtggcttcttccaatgtgacccagaccagtctacttaaggtcagcaaatactgttcactttctcccgtgaagtccttcatgaggaaagtattttttattcctgacattatctagggatgtcttcattataggaattacactgcattcaattgcacacatggtgattcttctgtccaggcatcagaggcaatctcagcaacttcacagcaccagtttctctccgtgagccttcccagagaaaagggccactcagaccatccagctgttaagttagctactttctggtcatgtgctgggtggaactcatcatctcatccttttcaacactgctgtggatgtgcaacccagtcatcctgagtgtgcagaaccttgtggtcaatgtctatgccactgttttttgtttgtttgtttttaagttttatttatttttatttttttattattattatactttaagttttagggtacatgtgcacaatgtgcaggttagttacatatgtatacatgtgccatgctgatgtgctgcacccattaactcgtcatttagcattaggtatatctcctaatgctatccctcccccctccccccaccccacaacagtccccagagtgtgatgttctccttcctgtgtccatgtgttctcattgttcaattcccatctatgagtgagaacatacagtgtttggttttttctccttgcgaaagtttactgagaatgatgatttccgatttcatccatgtccctacaaaggacatgaactcatcattttttatggctgcatagtattccatggtgtacatgtgccacattttcttaatccagtctatcattgttggatatttgggttggttccaagtcgtcgctattgtgaatactgccgcaatgaacatacgtgtgcatgtgtctttatagcaacatgatttatagtcctttgggtatacacccagtaatgggatggctgggtcaaatggtatttctagttctagatccctgaggaatcgccacactgacttccacaatggttgaactagtttacagtcccaccaacagtgtaaaagtgttcctatttctccacatcctctccagcacctgttgtttcctgactttttaatgatcaccattctaactggtgtgagatggtatctcactgtggttttgatttgcatttctctgacggccagtgatgatgagcattttttcatgtgtcttttggctgcataaatgtcttcttttgagaagtgtctgttcataaccttcacccactttttgatggggttctttgtttttttcttgtaaatttgtttgagttcattgtagattctggatattagccctttgtcagatgagtaggttgtgaaaatattctcccattttgtaggttgcctgttcactctgatggtagtttcttttgctgtgcagaagctctttagtttaattagatcccatttgtcaatttggcttttgttgccattgcttttggtgtttgagacatgaagtccttgcccatgcctatgtcctgaatggtaatgcttaggttttcttctagggtttttatggttttaggtctaacatttaagtctttaatccatcttgaattaatttttctatgaggtgtaaggaaggaatccagtttcagctttctacatatggctagccagttttcccagcaccatttattaaatagggaatcctttccccattgcttgtttttctcaggtttgtcaaagatcaaatagttgtagatatgcagcgttatttctgagggctctgttctgttccattgatctgtatctctgttttggtaccagtaccatgctgttttggttactgtagccttatagtatagtttgaagtcaggtagcgtgatgcctccagctttgtccttttggcttaggattgacttggtgatgcaggctcctttttggtttcatatgaactttaaagtagttttttccaattctgtgaagaaagtcattggtagcttgatggggatggtattgaatctgtaaattaccttgggcagtatggccattttcacgatattgattcttcctacccatgagcatggaatgttcttccatttgtttgtatcctcttttcattgagcagtggtttgtagttctccttgaagaggtccttcacatcccttgtaagttggattcctaggtattttattctctttgaagcagttgtgaatgggagttcactcatgatttggctgtttgtctgttattggtgtataagaatgcttgtgatttttgtacattgattttgtatcctgagactttgctgaagttacttatcagcttaaagagattttgggctgagacaatggggttttctagatatacaatcatgtcatctgcaaacagggacaatttgacttcctcttttcctaattgaataccctttatttccttctcctgcttaattgccctggccagaacttccaacactgtgttgaataggagtggtgagagagggcatccctgtcttgtgccagttttaaaagggaatgcttccagtttttgcccattcagtatggtattggctgtggtactgtcatagatagctcttatcattttgagatacgtcccatcaatacctaatttattgaggtctatgccactgttgttccactggtacaagtcagctctgacaaaaagctagttgacattctccaaaatatgccaagtgctataaagctttaacaagttggcgatgaaaaaacattcctaaaaaatagacttctcctatagttaaatgttccagtagccctgaagttccttttatcttatttaataaaatgcatggaatcacacttttattatagttacatgttttcaaaatggatgcatccgaggaccatgtaatttctttaattcagtgtctaccatgggttgacatttctgtatcaagtttcttacatttttattttcattttatcttggtagcagaaaaggtttctctcaaagtatactattatactataattatttttcttttgagacagagtttcactctgtagccaggctggaaggcagtggtgcaatctcagctcactgcaacctccacctcctgggttcaagcaattctcctgcctcaccttcctgagcagctgggattacagacatgcaccaccacgcccagctaatttttgtatttttagcagagatggggtttctccatgttggtcaggctggtcttgaactcttgacctcgtgttctgcccgcctcagcctcccaaagtgctgggattacagatgtgagccaccacaccctaccttgattgttaatattgcttaacagtcttctattagtaataaaatttctcagggtttttacttttgaaaacattttaatttactcttatttatgaaaggtagtttagctaaatacccagttttagcttttataccatgcttgttcgttggaacctccctggctgtaaatattggattttacatttaacctagaatttattttaaagggttttaaatatttacataattagatattatacatttacacaatattttcccacatgtgctataattgacaaatacaaattgtatatatttaaggtatacaatgtgtttatgtgtatgtaaatatatataataaaattaccacactcaagctaaataacatattcatcacttcccatagttactggtgtgataagaatatttgagatcttcttcattaataaaacttacctatgcattaactgtagcctccatgctgtacattaggtctccagtatttattcatcttataaaaacaggtttgtaccattcaaccaatatctcattcccccaagccacagcccttggtcactaccattctactctctgtaactacaaattcaagaccttttttagattccacatataattgagataatgcagtattcatctttctgtgtctggcttatttcacttagcataatgccctcaagatgatctgtgtggttgcaaatgtcaagatttttttcaaggcctgaattgtgtctcacacacacacacacagacacacacatgcacatgcatacaatacatatatgtaaaatctcctttttcttgttagataaaacagactggagtgcagtggcatgattatagctcactgtaacctctaaattttgggtataaattattctcccacctcagcctccaaagtagcaaggaccagagcgatacaccaccatgcctagctaatttgtagggacacggtcttgctatgttacccagcctacggagtttcactctgttgcccaggctggagtacagtggcatgatctaggctcactgcaacctccacctccaaggttcaagcaattctcctgcctcagcctctggagtagctggggctacaggtgcccgctatcacccaactagtttttgtattttgagtagagatggggtttcaccatattggccaggctggtctcgaactcctgacctcgtaattcacacaccttggcctccaaaagtgctgggattacaggcatgagccaccgtgtccagccccttatctgtagttaataatgcttcaataaacataggagtgaaaacatctcttcaagatagtgattttatgttctttggatatttacttagacgtgagattgctcaatcacatgatagttttatttttaattatttgatgaaactccatgctattttccataacggctttaccaatttacatccccagtgatagtgtacaagggtccctattctctctattcttgatgaacacttgctttattttgaatttttgataagtatcacctttatacgtgtttgaatgctaactcactgtggttttgatttgcatttttctcagaattactaatggtttttttaaaaaaaaaaaacctagttttttgaccacttttaaaagaatgtgttactttttgttatttttattttgggggcttaagttttatgagtttcttgcagattttgaacactaatcctgtatctgatatttggcatacaggtatttttctccaattctgtagatagcactggcacacaaactcaaaactaaagcgttcttcaaagtgacacaaattatcctcaatattaagaaaacttaaagaaaacatcctatttgtaaaaatagaagcagaataagactggtctgattgcactgctaggaaatctattttggaaacttgttattaaattcttggttaaaattctgaatgtccacttttctttccctgtgtcagcagtgggtgagattctgggtgtgggtaagggtggggagtcacctgcaagtacctgaagccaagagcatgactgctcactagtgtaatgtttatgattgccggcatgtaaatatttcactgggttattcctttttttaaaagcatatgactaccatatggtaatattactctaaaaggaagaataattccttaaaatcatcaaaaacccagcatctatgaactccgtggtctttttcctaagctgacatgcagtgctcagctgcacatgcatttccctatgtgaagttgctttcagaagtggccctgagacatttccttcagttcagcccactctatctgctgcctccttggtacagagcatctgccatttttggcagctggtcaacctctggccatgcagaagatggaaactgcatggccaggcccatccaacacacacaggttacaggagtaggccaagagcacacacctttcccttggtctccctcttattccccactgcctctgctcctctgccattattattctcctcccctgaagatcatgtctcaaccctattttgatatccagtggcttcagagccttccaaagctcctctctaaaacatccctgtgtaattcttatctcaggaactcctttcaatgaagcctgttaggaaggaacttgtctggtctttggaattaagctgctttcactcacatgtcatctgacttctaagtgtgcaccagggaagccttcagaacaccaagatgtggagctggcaactgctatcagagctgctcaatttcaaaaacagaaggaaaatatgcttttccagcttatgatacagctgttgtctttccgacctatgtttgtcttcagtttaacagtgaacaaagacggaactctttgtactctggagggagtagaggatcttagtgcatacttaagtagctccatttgataaattcttctggaaggaagcattaacaggtgtagaatgtatcagcttttatgaaaagtatactagcacacactatactagggttaaaacctgaactgcctttctgctattaagagatgtgtcttgcagaacatacaacatgataatgataacaacaactgtagctaatatttattgagaggctgcttgcagagctggtatctgagcctaggctgtgccactctagagtctatgctttcattaaccattctgtctactgtcctttagtggagagtggacagtcctggcctagttactgacataaaacatggttgtatatggaagaaattttaaggccaagttgaagagattcaattgtgactatgttgcagcaaagaaataactatgggtgaaactaataattgggtggtttgcagcctagcatgacttcctcttggaattgaaatgttccaaagcatttctggaaaccccatctagctaaagaaaccattatttgaattttgttcttttggaatgatattcagtcctcttctagaatcagacctcgctagcagttatgtaaaccttttcaggttgcaggggtaccactgtgaaagggaatgcaaaggtttctattattcttgacatggaaagcaggctgagaaaggcagacacatcagattttagtaacaggatacagattcaggctccaaagagaatctctaatatagaaaagaataaaatgggggtaggtagtgtgtggcaacaatatgcttgctctgcaatgcagtgacagagacactgcttccagagggaccttcagtccctgatccctgggacaggctgaatggtggtgtgcgtggggagctgaaaagaggtgcaggagaaagtgctgtggcctcggaaggaaggaacatgacagatgtccacagcacagaagcatcctgctggcagaggtacagagcattcatcagtgtcggtctccaaagagaacgctcagaaactgagcttgggtacttgtgtgtgctgtaaagagggtaacagagaaggcaatcaaggacagaaaaaaacaaatggcagccttcagaatggaggggtttggcaacccaaaggatctggctgccttctgtcaaggagaagtaaagtggagggaaaagcctatattcctatgcttcaggggctactgccagagaaataagagctttccttagtctctatcttccttaattaagcctcttctcagtaccaagtggaatcctctttcatataaaaaaataggacaaatgtaatacatgaatgatatagagataaatcggctccctagacatagctcagtacaggcagtctcaaattttccatggcagtgaagggtgttgcatcaggaaatttccagcagcttccttttgagaaggcaagaagcaaaagtcactggttatagccacaaacttcctaaactctttgctgccttgaaaaactgtgcccatgggtggaaaaagtcctaaactgtgcccatgggtgaaaataaaacccgctgcccagatttctggagaagtggttctaggtctgcactgggccttattttttcatctgcaaaatgcggggtacaggtggagaacagaaatggcttaaagaagttcccagctcaggcgcagtgcctcatgcctgtaatcccagcaatctgggaggccgaggtgggaggactgcttgaagccaggagtttgagacctgaacaacatggcaagaccctatctctacaaaaaataaaacaacaattagccaggcgtggttgctgatgcctgtagttctagctactcaggaggctgaggcaggaggatcccttgagcccaggagttgaaggctgcagtgagctatgatcatgccactacactcctgcctgggtgatggagaccatgtctgttgaaaaaaaatcttaaaaattaaaaatcaaaaagaagtccccaaatctgtgggtgccttaaaatctcaaattagggctgggctcgatggctcaggcctgtaatcccaacactttgggaggccaaggcgggtggatcacaagtcaggagttccagaccagcctggccaagatggtgaaaccccatctctactaaacatacaaaaattagcctggcatggtggtaggcacccgtaatcccagctacttgggaggctgaagcagagaattgtttgaaccaaggaggcagaggttgcagtgagtcaaggtcgctccattgcactccagccttggtgacagagcaagactccatctccaaaaaaaaaaaaaaaaaaaaaattatatatatatatataaattaccaagagttgggtgtcatttatttatgcctccacactgtaattccgaggtcgctgctttcctgattctgtgctgatcctggcaagtgacaggtgcacaaaaacctttgttcaattttgaattaaccaggctgtaaaggagtagctttgctttgccaagggctcatggtgccagaggctcaaggaagccagcactttgcagagtacatggatattagtttcagctctctccttttaaagggctgaacctgggagaaagacataacctcacaatttttcctcctgctgaataaaagtccctatgggggaacaggtctgtcttaacatatgaggtttctcctaggttgaactttgcatgcactctattaaaatatgaacattagtccatgcagtttgcaaacacttctgcatatatgacttacttgaacttatgtggatgaaggtcacttaaatataattctgctttaagtgtcaactattttaattacagaacaaggaaactggactgtgatgattctatcagctctaaaagattctataaattttagacttcaaatgaacacctctaaattcttcttcaaggtttaaaaatcatttaagacaccttaagtctgggtgcctgcttaacaggacatcatttattttcaaattattctgtattaactttggttctattagagggccacattttccttatggcatctataacataggtggatgttatctaacatgctctatttttgacttcatcttttaactctttctttaaatgttctcattgctaatgagcaagtttatttagagcacagggatgagaaatgtatatggaagtgaccatttggctaattggccactatcttatgaaattaatctagtgaagagaaactattttttaaaaggaagtttctggataagctgttaattgcaattatttattctctcttgaagaaccgtagatggttgataaaatgcaggcaggttctgtataaacttggtcctgggtagttggaatacttatgacagtgactttcatgcgaagtcactgtttgcctgtatataaatcacattttctcatagcctccctatttaaatttggaaacgaaaatactccacttcactaggtaatacttttaaattagtctcaaataggacataacaaatgaatccaaaacataacctacaactcactgacaatgcaagaacaactttgccaggaagcagtgttagctaacacagaatgcacgctttaagtgcaagctgcactggtgcttggaagaatgaaaacaaaagtttactgaaggctgagcttttgatttttacaaaaattctttcaattctactgagaaataatttcaggtgttcatatccatctggaggccagaatgtaagagacaaaagctactttacagagcatgcagaagttacactgaggctctgagaacccactacaagaatggcttgcccaggaaaagaaagagcagtattcaaagcactactatttactgcttcggaggccttcaggggaattttgagctgggaaaatataagccatatttatctttttgaaaaatctttattaaaaatataccagaagtatgtggaagaaatgtagaagaaaaacagattgacaactaagagaatgaagtcactacagcaaagtttcaactgttgtgcagtgtttgagggtctgtaaatagttccactataaaccttcactccccacattttaattattttcacatataagtttgttcctagctgaaagtgtctagagtgaacttttttaggcttctcttttccaaattatggacaaattataactacagacaaaactgattatatgtatgggggcaggggtggcacaaacagggtcagggtagacccaaacaaagttagtttaacaagatggattgtctctaaagacaagatttgatttactgacatgtgtaaagaaagtgtttctaagaatagaagctgaccagcccttaacttgaaacagaaattgtcagagatgttggagataatgatgccacaatctgccccaggaagtacatgctttgctgggccaccatgatccattctttctacctggctgagatattctactgtctaagcggtgtgtggccaatggtaactcccaatccattcatttcttaattcactcactcattcttgtattcttactgaacttatgttttatgctaactcacttccagacaggtggtgcatacttattgaatcatgaataaattctgcgaccccttcttctgatgccctggtcatgatgaagtgatcttctgccaaggcatcttcctcttcacacagaatgccccagcttgaccttgggcagttctgtctcatgtacagttacggttttcattgcatctggtttttcatatcagttcttgcggcctttgccaatgtgacctggcatcttcgaagatgacactgagcatctggatcctctaaacataaaaagaagtcagtgatggtggagataaggtcagtggcatgtggtggggacctatctggatggccagttcttcacaggtcataatctctatgaattgttccaagccttcttaactatgtacagcttaagtttattcacatgtaagaaatgaaaaattcatgtcactagctatttaggggtttacataaggctacttacattttgaaatgtgaacatatgcaattaataagacctactctgttttatccgagtatattttcaaagtcagcaaagaaggacattatttttgtaaatgggcacttcctaggtattaagaagaaagtatctttgctggggcctatgtcaaaaatgctaattcctaggttatattgaaggatttttatagtttgaggtttcacatttaattctttaattcatcttgagttgatatttgtatatggtgtaaggaaggggtccagtttcaatcttttgcatgtggctacccagttatcccagcaccatttattgaatagggagtcctttccccattgcttttgtcaactttgtcaaagatcagatgattacaggtgtgtggcattatttctaggctctctattctgttctgttggtctatgtgtatgcttttgtaccagtaccaggctgttttggttacggtagccctgtagtgtagtttcaagtcacataaattgatgcctccaagttttgttctttttgcttagaattgattgccttggctatttgggcttttatggttctgtatgaattttaaaatagttttttctaattccgtgaagaatgtcattggtagtttgatagggatagcactgaatctgtaaattgctttgagtagcatggccatttaaataatattgcttcttcctatccatgagcatgggatattttttcactgtttgtatcatctctgatttctttgagcagtgtttttgcagttcttattgtagagatcatacacctcctcagatgccaaaatcaactgcaacaaatacaaaaattgacaaataagatctaatcaaagagcttctgcacaagaaaaactaacaagacaataaacagacaaacctacagattgggagaaaatcttttcaaattatgcatccaacaaaggtctaacatccagtctataaggaacttaaattaagcaaaaaccaaatagccccaacatctcacaccaatcagaatggctattacaaaaaagaaaaaataacagatgctggagaggtcatgaagatgatgcaatgcttacagagtgctggtgaaaatgtaaattagttcagccattgtggaaagcagtgtgggtgtttatcaaagaacttacaacagaagtaccatttgacctagcaatcccattactggctgtatacccaaaggaaaataaatcattctacatgattcatgcatgattcagttacatacatgtgtgttaatcacagcactactcacattggcaaagatatagaatcaaccaaaatggccatgaacagcagactggataaagaaaatgtagtacacatacaccatggaatactatgcagccataaaaaagaatgagatcatgtcctttgcagcaacatggataaagctggagaccattatcctaagcaaataattgtaagatcagaaaatcacatattgtactttctcacttagtagtaagagttaaaacattgagaacacatgggcacaaagaaggcagcaacagacactggggcctacttgagggtgggaggtgggaggaaggagaggattaaaaaactgccttatcaggtactatgcttattatctgggtgacaaaataatctgtacaccaaaccctcatgacatgcattttttctgtgtaacaaacatgtacatgtacccctgaacctaaaagttaaaaaataaaaagccccctccaaaaaaaaaagtgccttaagtgctttaggaatattatcttacttaatctgtacaataaccctacaaggtagactattttcatcttcatttatgatgatcacagagatgacaagtaatttgtccaaggtcacacaagttactgatggaggaaccagcattgggggttgagttcagacaatgtagttctatagtccatgttcctgatcattaagctatgctgtgctgtttctcaaaaatagtaacagctcatacatacatggcatttgctccatgccaggaattgctctaagcactgatacatacatgagttaatgtaacccccgaggtcacccatgggaggcagtatagtgaggtggggaggagctttgatgctggagttcagtggctgcacttgaatctggcctttgcacttttaggtctgtgattcaaacatgttatttcaagtctctctgctcccttcctctcatttataaattgtggacaatcacatacatcccccatatttgtggtaaagatgaaatgagctctgtatgtgtgagttctgggaatgctgtctggcacatggtaaggtcctgactattattactatttgccaaacaccaggactctaccttaaataagtttaggaggttcaaataccttttctgctacagcacaagaatttcgaccccagccttctcgctgtggtacatgtgttatttctactacatcctgcttttacaaaataaacatcagctatgggacctgctactctagtctctggtcattgatagcattttctaatatattgtaaatgctaaagttgttgagaagtgagcaaaggcataaactttcgaggcacaaatgcaaaataacatataagcagaaaccaagcctgaaatgaagagtaaaacccaaactgaccatggttcaaaatactaatgattataacaatactccagggtcttttagtacaaggttaggctagtaagcattttagtactagttcattaataaagattttgatgctttcaggaacgtatttcatatagttataaacaatctatgacattttgttaacccctaagaagtatgtttaaaaaaaaaaaagatttaacctatggtttctgtcttatcccaaaatagcttttaatgtttctgaccaaagtgaagtttgtaacctgaggtccctagaattactatgattcatgaataaaattgggggggtgggggtaagtccacgaattaccttaaattacattttctttctgcggaaatgatctcgatatttcaatggttttgaaagaagttctgtgtcttccaaaggtgaggaacatttgggccagagtgtacaaggctgggcagtactatggaaaacagttaagggcacaagggtctccctgttctcacgtgggctgggggcttctgcttggagatcctctctctaagtcctggactccacaagggcgttgaacagagctaacgctgatggagacaaaaacaaactgtatatggcaagatgaaggctaaggtcaggaccccaatcaggtagcaaaccccatcaaattagcgcagttcacagttcagaaagaaagaaatgatgtagacagaatcaaggcacataagcttaaaagagtaacgtgtgcatcccaacaatctatagctcaggttacaacatcaaagatgatgacaattaacatgttttcagacatgactttatcattgaaaacttgctttttattgctttgccatgagaagcctcataactaagaaagcaggggctggatctggattaaccatgtggttttggggggtgagcatgcagtatacaggaaacagtacatcaggactgagcctctttcttgggggaccccaatgcacagatctggaaaattctcacttagaagtgaggaaggatgctcagtgctaggcaagccatgtctagaacagactcgtagcactttcttcagtaacagccttgcatggtctttccctgaattatctgactcttgaggtgttttaaaattaaaactaaacaggagcccagtgcaatggctcatgcctgtaataccactgctttgggaggccaaggtgggaggatcccatgagtccaggagtttgagaccagcgtgggcaacacaggaagtttccaactctacaaaaaacaaaataaaatatattagccaggcgtggtggtgtgcaactgtgttcctagctgctttggaggctgaggtgggagaattacatgagcccaggggttcgatgcttcagagagctatgatcccagtaactgcactccagtgtgggtgacagagtgagatcgtgtctctaaacaaaaccaaaaccaaataaaaatcaaaagaacacttatccagggcccccatggctgccaccatgaggccagccggtgttctctccagtcagtaatgtgtgagtgccttcatccagcttgcagcctgagtagtctccaaggttgtattttgattgcaaaatattatcacttctggggaatcccacccacctgcatgctcttctgcctttcactttaacctacttttgaaatctccactctgccctatctctaactacaaacatgcaacagcagatacaacttcctctcctttgagccccttgtttgctaaatcataaatcttgaatgttaccattgtactaatgtctggtcattcagacaacatgaagttaatatcaggtcatcatatattaatggccagagagaaaacaaactgaggagagacaggaagaacatattaataccaaaaaaggaacagatctggcttaaatgggatgccttcaatttgcagaaacatcacccattattatcaaaggtcatagtcagttactgctagaaaaatcaataaaattaagggtggatgggaggaagagacccaatacgtaaatttatagtatgtcctctgtatcaaaggaacttggtgaacaactgtgcgttactaacttttggaaataaaattagttgtcaacatagtagaccatttacatagtttcataggttcctgttgtgaatatactttaaagaactgtattagtgcaaaacagagaaaaaatagggcaagaagacatttaaagattgcatctgcctgttggtcttcatcacccattttcttggcctcttgaaggtgttaatgttttttctgtttgtttttcaatgaaagtgatccttgaacatattctacctgtccatgccacttagtgcagattatcagtgatcttgattactggtgatgaaaggctattagtccattatgcttgtggtatataatagaagattctagctttctcactggaacatcatggtctgaatgtattattcttaatatggtatgtatagtcttgactgcatggtagatgaaaaatattcattcattttccctcctctccctgcaccaccaccagcagtgatgttagtcctaccagtttgagaagtccaatctgcagcccatcttgtaccagggaaaggctgccatgacctggtaaacagggcattagccagtgcccttctccattaagggcagaccggttgtctactgcaaactgatgacatttgccatttcttatctgcttacaaatacatttgctcattaacactagaatgctacctgagagggttactgagctattaagtatcagtcacactaattctgcagaaagtgacttctctaatggcatttctctttaaagaataatctcctgcagggggagaggagcagagagaacagacaaagggaaggtagcctggtgaggggccatgtctagactttggcaatttcagtctctactttagcggtctgtttagtcccgttaatctagaggtcctcaatattgaaaatacaagtaggagcaacttaatgttcttgctatctatgaaaatataggttgctaatcaagttattgggaagataagctcgggagtattttgggtattttacaattgaattttctcatgaatttacaaaaacttaatttcaaattatcataaaatgtattaaatctcatgttatgacacttagtttagaacatttggaaagccattaggatgaatttcaaacccataacaacaggttcctctaaagattgatgaattccatttggtagcagcagggttgggaggtgtctagaactggactctgacatgtgtccttgttctgtcccacgtgtaagagctcaagctgagcctggcttcctgaagacctcagcaaaccctatgtaatggggcctgctttgtgccaggttcacactggaaagtctacagacgactttgcatctggctagcaaagtgaccttggaaggagccattaccaacttcatgtcatacacgaggaaagacaatgggggctccagcaggtcatctagaccggagtgcagagtaccctagtggtgatgtgagactgctgactctgtgtgatgtcacccaggttcctggggcagctgtgggcatgggactggatcagcttccacagtggctccatttcagccacagctggagcttttccaccccaaagctttgctgtccaatgctaccacagggaataaccaaatatagctatttctatcaatattaaaattcagttcctcacttgtaatagctgtatttcaagtatgcaggagtcacatatgacttgtagctacgatattgcacagcgcagagattattcccaccactgcagaaagtttcagtacatgggcagatccaagtgttggaattctgctctctggccacaaaggccttttctcctaaattacgactcagcagcggggcccagcctcactatgttagctccttccctctcctcatcatccagtggacacctctgattgcccttcttccaagcctggactttcctaccccaattaccttggcatccttgattcccttggtcactgactttgtgtacacacccctcgctccatgcctaacctttggcaggtcacatccttttgactttcctgcgactgttcctgggatgtagcctattgctggaaataatgataaaaataatagaatgggaagaacgtgtgctagtcagccttaactgggtgttatctgcttcttactccttcagttcatcccatattgactcactaactcatcccttaggatgcctcattcgctaaaacctcagctccctcatgacccccaccctctgcagatgacccacttcataggttgggaaaatcacccaaaaaccattgacatgagcttcctcaacatttcctgtggctttctcctgtttcctttagccaaggtgacctgtcagctgctctccacctgggagtactaatttcctgctcccagatcttcgttcatgatgtttctccattcagaaggcctctttccaatctcacctctgccacaaaactggttttgggtcatcccacctcaaagcaaccccttcctactccaaatttccctaacattttatctgtatctgttcctctcacagatgtcaccgggcactgtacctactaaagtacatataggtgactgcacatcttccccactaaacacaaccactgcaagaagggggtgcttgccagattcagcctggctccccagcagccaccagcacagttccctgtgtagagagtagctggtgcatattgactgaatggctatctatgtatctacttttgcaaatgtcagacttacttctaaggtagacagattgaattcaataaagaattgatgggcacatttctcctaataatctcaacatgaagttctaactaaacaattacatgaccaaaacatctgatgggaagacagaagtgtacttgttgatggctagaattgcaataaaagtgcagtgtcttcctgagggagggtgaagtgggtacaaaatgataggaagtgggcaaaagaaacaaaaaaagacatcaaagcagaaataaacttaccttgggtagcgatgtaatgattgggtcgataacaaacctaaaagtaaataaaagagaatatttgaaaaacataaaatcaacaaacagcagaaaagccacatgctaactttgccgaaatgaatgtgtacatgaacaccaacaactgcatcacctcaaagtgaaattggcagacccagcaccactgagtttctcttaataagtgaaggtgcatcaaatacaagagttctgatgcccataccaaaggtgtgggtaacttaatcataactggctatgagatgatggatgagcaagaaacactaacaacatggattctcagaaataacatgagcattactcttataaagtgcaaacaggcagagaatttgcaacagaatttcatttgtgtttggaatgttattggcaatgtgccaatggttcaacacatattctattaatatagacagttatgtcaatagtgatccttgaaaccattcttaaacactgctaataccatgacatggtactgcacaagggccaggaatttaaggaggcagaaattctgaaagaccccttccttttatcatgaccctgtaagaaatgagacagataaacattggaaccaaagaaaaaaggggccaggtatggtggctcatgcctgtaatcctagcacactttggggaggctgaggctggcagatggcttgagcttaggagtttgagaccagcctgggcaacatggtgaaatcccactgctacaaaaaatacaaaaatgagccaggtgtagtggcatgcacctgcagtcccacctacttgagggcctgaggcaggagacttgcatgagccctggggctcaaggctgcaataagccaagattgcaccactgcacttcagcctgggtgacaaagtaaataaaagagaatatttgaaaaaaaaagaaaagaaagaaaagaagaggaggaagaaacaaaaaaatgtagggtaagtatctgggaaagataaaacaaaatctcaactcagagaaaattacacccaataacatatcgccatggagcttaatactttctatttctgcccggagattacccaaaatatactgtgcccaaagctggctggaaaacaggaaaaaaaaaaaacttgaacagaaaactcagatttgtcagataacttaaatgcatgtgttagattattttgctcttaaaaacaagtagaaaacaatgaacaacaaaagcaaacattcttttatccagttgacttgctgtaggtctcaaattatagaaccatgaccaatattaaatagaactctttaaaccatcactcatttctcgtcggctggtaagtcccacaaggaactttgacttatccacactatacatcagaatgcctagcaaggtccccaagtagatagaagggactcatctgatgttgaagtgacccagagtccacagtggcctgtgttgctgaactcagtcctcatctacttggccattggtagcatgagtaagatcaatccccttaaaatactgtcttcactggctccaggatatgactctcctggttttcttcctacctacctccctggccacttgttctcagtttcactggctggttctttcttttcaacttgatgtggaaggcctggttcttggacttttcccccatctgttttcactctctgggtgagctcctccagtcccatggccttgaagcttgtctgtacatgatgaatcctatgttattgtttctaggccagaccttttcctggaaatcttcatgcatacccactgcctgctcaacacctccagtgggaaggctaatatatatttaaagcttcacacacctaacaatgaactcctcatttcctccctagtccctaccccaatttgctccacctgtcttctcctcagcatccctgacccctcctctccctcctgcaccccatagccaatctgccagcaaatcctactggctctaccttcaacgtagctcaagggtcttgccatttctcacctccactgccacctctctgatgactcccacagccacacagcaggcttctctgctttaagtgccatctgaagacaggtgcacagtgttcacggtgctgccaacagggaggtgattagctggcactggcaccacctggcacatctgggcattaaaagggaggaaatctccattagagacacaaatatataagtttcattaatcctatcaagctctcgttaatgctattatgcctgacatgagaattcactaggcttcctgatgaaaataagacggatacatatctctaagaataatgtacacaaattatatggcaaaaatataaaagttcatacaatgggcaatagaataaatatgaatggccatccaacagatgaaaaatttcttgttaattcaaattacttttgaataggaaaaagtatttgctaaacactttgaatcattatgtatatgtgttgtatctaacacttattaaagcaaagatctacagaaacagcacttcctgaaatttctttagtaaatgaatttaagatcattaattttgtttaaaggacaaaaattgtcttattcatctttatatatcctttgcattatatccaatgcaaaggctaactcaaagttatttaatgaatatggaaagaaggaaaaaagacagccaaagaaagtcaagagggaaagctgagaagagggagagggaaaaacaagtaaaaaatatgaaggtccatgacagatcctaacttagcacatgaggggttattgaaattcaccaacaaaaagttgggggaaaagacctaaatttagacaaggctgtcaaactgtagtttcttttgtcagcaatttatagatcttatatcccagctgaaaatcacttgctaatctaatgtcaaatccaagttcaaagagacttatgtagacttaatcaacagggagaaatcactgatagttataaagatcctgatcacagaggactttctggctggaaacaatgatcttagggctaccaaagtcttcagagccaaaataaagctagaatgcttaacaaaacaagatgggagaggtggcagtaagagaagactggaattatttgagttagttcagacttgttatttagttactcgtctatggggagttggaatgtaccccccagtctcttcttcacagagatttacgtaaggaggaaaatgttccatctaaatcatttaggaagttccaggcaactgacctgagagtatcacgtaatccagaccccaatttgcttactcctcttccaactgagttagtagtatacaggtaacgactatctgccgtgagacagcatcccaaatcagcatctcaaagcattttttcaccggtaaattatatatatgctttttccattgaaattataaacatgctttttgtaacgtaaaagccattaaggaggctgagtggatgataacctcccacttctaaaataagagcttcagtgtgactttcagggaaggtggcttgaacccccaaatcaaacattcaaaatgcatgtggaccagggtccaagagaaggtcaaatagttatcagcaggaaaatgtggtttagcctgccaagtgtttttctttttttttgaaaagcttgtattgagtcaagtttaaacattcctaattacaatttgaaatgactaattctaattttaatttgaagtaactgagtacagtacaacagtttaataattgtgtagtaagacgcaggagctcttatcagctcagtaagtgaccttgaaactctttgaacatcagtttcttcatctgtaagatgagaataataatacgtacctgaaggtttacagcgatggccagatgaaataatagagttaaatacatctatgttgttctctggtttaaagccacaactccaaaaatggcaaatgaaattatgttaatatactaatgatacacattgaactaaaatctgtttctgtggattttccattcaaagatcttaatcagtctctggaggaataaagcacagaagttaaatatcttttctattttaggccaggtgcagtggctcatgcctgtaatcccagcactttgggagacgaaggtgggcagatcacaaggtcaggagatcaagaccatcctggctaacatggtgaaaccctgtatctactaaaaatacaaaaaattagccgggcatgatggcacgcacctgtagtcccagctactcgggaggccaaggcaggagagtcacttgaacctgggaggcagaggttgcaatgaactgagatcatatcactgcaatccagcctgggcgacaaagcgagattccatttcatatatatatgtgtgtatatatatatatatatatatatatatatatatatatatatatatttgtgtatatatataaaatttgttttgaaatagcaatacatttccccttagctctttctcaatctaaaataaacagtatctctatgatagtaattggtttactaacttatattgcaaagaatatgccttaaattgaagcttatggataaaactttcagtgtttattttcataatcacgctgctcactatgtttaagaggagtctttccacctgaagcatggcttactagctggacgaaatgcaatgtcacaccatcaaattagtactgaaaatgctgccagctttaaaattcagtctactaatctgagacaactgggacctgtatctattggttcctcaaatgaaacctcgttaaagtgggtaaccatttttaaaacaataatttcacatcttcaacatttttaacttaaaacttgtaaatgacctttactcaccgatctttaaggcccaaggccttttgcttatggctctgtggaggggcagaagtgaaaaggacaaacagaagattggccaggagtggacactggttgaagctgagtgatgaggacacagggcttattatagtgtactctcaacttcagtcaaatatggcacatttcaatattaaaagttaaatacattagtctaaatactatttataagaaaaacaggccaggcacagtggctcacacctgaatctctgtaatactgggtaagcagaggagggaggatagcttgagcctaggagttaaagaccagcctgggcaacatagccagacccgtttctacaaataaataaaataattatccaggtgtggtggtgtgtacctgtggtcccagctattggaggctgagatggaagcatcacttgagcctgggaggtccaggctgcagtgagctgtgattgcaccactgcactccagcttcggcaatggagcaagaccatgtctcaaagaaaaaaataagaaagaaaattaaaaaagagaaaaacaggaaaaacatcctctccctagatgacaaaccaaaggttcaagagaatgaaagcaaacagaccagcttaataccatcctcttcagtgagaaactaccccaagggagacaccaaatggaataaagggagagaatcaaagaaacagttttagctctgggttaagatgtaagttggagcctatagtgtctgagaacttcttgtatactgcaggcattctgcctctcctgttgactcttgttgagtcagtgaaggaaataaatcctatctaaaaagccttgcctctgcctctccactcacttgcatgcctgtttagaagaaatggtagaacatgggaaggcacagaccgtaggtgagaggtgccagggagcctgctgcttagattctgctcctgcccttggggttgcccagtaaggctctcccatggagggtgggaaaggaaggggtgaatggaacagactctcaatcccacacctgatgaaaaccagtttcttacagactcacttcattgagtctttctaaaacattcaatttcttttcttgttttttgtttgtttgtttgtttttttactattcacagaagtttactgacctccccggcacctccccggccaggcaggccaacctttccgaccaggggaaatgtccttctacctgccctctgctgggttgcagcctattccatgagggggcactggaagcaggagggagttctggctagggcagaccttaaacgcaagggaagctgagcagaggtttgcacactcaaccccacttgatgttcttctcctcctcagtcatggccagcgtgttggtgactagaccggtgccaataatccagttgccatctctcagggtgaagcactggcctttctctaagatcactggctgccgcaagattaggttgaacttcaggttctccccgggcatggcaagctacttctctgggggcaggataatccaacaggccatgtcccaagtcagggagaacatgactggcatgaagtaggacacaaagggcttgtggtggccaccttcctccttgctgaggatgtaaacctgggcctccaccttctggtggggcttgatggaacccggcttgaccatgaccagaccccgccacaagtcctccctcggaccagggccctgaggttatctccagcctcggccctctccaggctcttgtggaacatctcaatgcctgtcagcacagtgcagatgttcttattatgtcctaggagctcacgcttgtctcctttctttaaaatgtcatgctctagcatacctgtcaccatggtgccatggccagacatggagtacactgcctctacagtcagcaggaaaggcttctccaggtcacgggcaggcactgggatgtaagtgtccacagcatccagtagcttctgcacagacttcagacctaactcagggtcccgaccctcaagggcagacagtagagcctacaatgactggggtctcctcccctttatagccaaactcagtgaacagctcctgaatctccagttccaccagctccaccatctcagagtcctggacagcatcagccttgttcacatacaccaccacatgctccaccccaatctatttggccagtaataagtgctctcgggtctagggcatggggctgtcattggctgctaccaccaggaggcagccgtcaaggggtgtggtgcccgtgatcatatacttaacataatctgcatgacccgggctgtctgtgtgggcatagtggtgggcgacagtgctatactccacatgagccacactgatggtgatacctggagcttgctcctctgggggcattgtcaatctccttgtacttcttgaacttagccccacctccctcggctagaatctttgtgatagctgcaatcagtttggtcttgccatggtccacatggccgatggtacccacattcacatgtggcttctcacacacgttaagtcttcttggcccccacagccaggccgtggcacaagagaggcaatgccagggctttcagcagcagcagcagaccctgcagcaggaaggtccggccggcagcgagaccgctgaagtgaggcgtcgcgcgcagcaaggtggcagccgccattgtggtcatactctcacccccggaaccaagaaatggggaccaggagcccgagcgtgcagcagaggaagggcgcttgtaggtggaaacaacattcaacttcttaatgacaactatttcctgtttttttttcattcctgtttcatcaattatggatgatgtaatattatcacaatagtaaataccagttacaattaacaaaccggtttgggagcaaggctgactcttggtgagccagcaactcctctggttggagcagcagtgcacagatgtgtcaagcagtttcttgcctacaagaaactcagttcatctatgaagacatacatagactgaaagtgaagggatgataaaagatatcctatgcaaatggaaacaaaaaagcaggagtagctataatacttagacaaaatagactttaagattaaaaaaagataattgtataatgagaaaaaagtaaacagcagcctaacaattataaatgaatatgcaaccaacactgaagcatctaaatacagaagcaaatattcacaggccttaaaggatagatggaatgcaatacaatagaatacctcaacactccactataatcaacaccccactattgtcaatggacagatcatccagacagacatcattagttcagtagcacatgaattattctccaacacagactatgtgttaggccaaaaaacaagtctcagcacaatttcaaaaactgaattcatatcaagtatcttttctaaccacagtagaatagtgttagaaatcagtaacaggagaaactttaaaacctgtacaaatatatggaaattaaaatacagggtcatgaacaaccaatggaaaaaaaggaaattaaatgtttattgaaacaagaatagaaacacaacataacaaatcctgtgggatgcagcaaaggcagttctaagaggaaaagggcatagctataaatgccttcatcagaaaagtagaaacatctcaaatagccaacctgacagtacacctccagtaatgagaaaaacaaaaaaaattcaaatgctagaatcagtagaaaaaatatcataaagattagggcggaaattttaaaaacagaaacaaaacatacaaaaagtcaatggaacaaagagctggggtgatttagaaaaaaaaaatcaaaattgacaagctttagctagactaaggataagaaaaagaaacaaaaccatagatgaaaaagcaaacattacaattaaacacaaaaatacaaaggattgtaaatgattactaaagacgtttatatacaaactgaaaaatctagaagtgcttcaatttctagacacataatgaattcccaagatagaatgataaacaaaaaacctgaacagaccaataatgagtaatgcaattaaagcagtaataaaaagtctcccagcaaagaaaaacacaagaatcatggttttactgctgagttaccaagcattttttaaagagctaataccaattctactcaaaatgttccccataaaatgaacaggagagaaggcttcgaaacttgttctatgaggacagcatgaccctggtacaaaaaccagagcaggacacaacacacaaagacaaccacaggcattttaaataaccctgatgaacacagatgcaaaaagtcctcaacaaaatacttgaaaattgcatttgacaacacaataaaatgatcatgtgccatgatcaagtgagattcatcccgggaatatgaggatgattcaataaacacaaataaatgtgtaacatcacattcagtgaatcaagaaaacacataaatcatttaagtagatgctgaaaaaaaaatcatttcttcatagaaactcaacatgagtacagaaggaacatgtctcagtgcaataaaggccatatatgacaaacccacagctaacatcataatcaatggagaaaagttaaaagctcttcctccaagatctggaacaagtatggctacttttacaccactttcattcatcatagtactgcaagtcctagctacagcaattagacaagagagtgcaataaaaagcatccaaattggaaaaaaaggaagtcaaatttcgtgtttgcaggtgacataaacttatacatatctagagagagagagaaccctaaaaattccacaaaaatcctactagaaataataaatttagtcaagttgcaagatacagtatcaacatataaaaatgagtagcatgcccatgcaccaatagcgaaatacctaagaaagaaatcaagaaagctatttcatttcaaaaaaatatatatctagggataaacttaaccaagaaggcaaaagataccacaatgaaaactataaaacacagatgaaagatattaaagcagacataagtaaatggaaagatatcccatgtccatgcactagaagaatattgttaaaatatctatatcaaccaatgggatctacagaatcaatgcaatccatcttaaattacaaaagacattcttaatagaaatagaaaaaaccatcctaaaattcatacggaaatgcaaaataactcagacagacaaaagaaataaaatgaaaagttggaagcatcacactacctgatttcaaaatatactacaaatctatagtacgcatggtactatcaaaacagcatggtactatcaataaaaagggcgggggagagacagagatgaacaaatgacagacaagtgaagcacaatacacaaatcaggaataaattcatgcatttattgtcaacctatttttaacaaaggcaccaagaacacacatttgggaaggacaatatcttcaataaactgtgctaggaaaacccaacacccacatgtacaagaatctatctaggccgttatcttaccatatacaaacatctactcaaaataaagatttaaatgtaggacctgaaactatgaaactactagagaagaaaacataggataaatgcttcatgaaactggagaagacgaggaattttcaaatagacatcaaaagcacaaacaacagcaaacatgtaattacattaaacttaaaagcttctgcaggctgggtgcagtggctcatgcctgtaatcctagcactttgggaggccgagatgggcggatcacgatgtcaggagattgagaccatcctggctaacatggtaaaaccctgtatctactaaaaatacaacaaattagctgggcgtggtagtgtgcacctgtagtcccagctattcaggaggctgaggcaggagaatggcatgaacccaggagtcggagcttgcagtgagccaacaccacgccactgcattccagcctgggcaacagagtgagactccgtctcaaaaagaaaaaggctgctgcaaagcacaggaagcaatcagtagaatgaagaaacaggctgggtgcagtggcttacgcctgtacactcagcactttgggaggctgaggcacgccgatcacaaggccaggagatcaagaccatcttggctaacacagtgaaaccccgtctctactaaaaatacaaaaaaattgtccgggcgtggtggcaggcacctgcagtcccagctattcaggagaccaaggcaggaaaatggtgtgaacccaggaggcagagcttgcagtgagctgagattgtgccactgcactccaacctgagcgacagaatgagactccatctaaaaaaaattaaattaaattaaaaatttttaaaaatgaagaaacaacccagagaatggaagcaagtatttgcaaactatgcatcaggcaagggattcatgcacaaaatatatgaagatctcagactattcaaaaacaaaaatacaaatgatcttatttaaaaaatctactcaaaaccattgtcccccaccattatttccctaccttcttttcccgagcacctttggcccccttcccctcgccaccctttttcttccatctgcccccaaacttcttcaccatttttttccccaccatcatttcacaaagccttctctactctcctgctcaacaccttttccccatccatttacccaaaccccttccccactgtttcttcccaccatcttttccccttatccctggccaccctttttccccctcctgctctcatcaccctcttttgctccttcatctaagcaaaaacattttcccccatcttttcccaaaaccttctccccactcctactgctcgccaccctcttttcccccttcatctacccaaaaactcttttcttcatcgtctttccccccgttcctccttgctattctctttcccttttccatcaacccaaaaacatttccccccatcttttcacacagccttctccctactcctgcctacctccctctcttccttctccatctaccccccaaaacttttcccaccatcttttcaaagtctcccccctttaccactcatgctcttcttttccctatcctgcttgccaccctcttttttgccctccatctacaccaaactatgtttccgtcgttttcccaatcctctgtgcctgctccctctggccaccctctttcctcctcctcatcaccctctttcccccaccatctatcaaaacactttttacccactgtctttcctttctccaccatctttcttttctgccactgtcttttcacaaaaccttgtcttcctcctgctggctaccctctttttctttctcccacttgctaccctcttttgctcctctacccaaaaactttcccccacactgtattttctccccactgtcttttcacaaagccttctctccctactgctcgccccccttttcccccatcaccttcctctctttcctcctcccacttgccaccctcttttccccctccatctaccctgaaactttttacccaccgtctttctgcaaaaccttccttccctcccgctccccaccctgtatttccgcctccatttacccaaaaacttttttccccaccatcttttcgccgccatctttttgcaacgccccttctccggctaagctatccttttctgcctttggcactaactaccctctttactcccctccatctatcccaaaactgttttccttctcctaccgctccagccgcactcctatctccgtcgctgccaacaaccgcagcgaggcgagccgcgctcccgcggctccagcctccagcatacggccactgactcctgattcctagtcctccatgccgtggagcgagcaactcaacgggaagacacaggaacctgaaaacacctgactgctcttcagcatcatttatatactgcggctatgcccacggaggttcctggactgcatgttttgattggatgagaaaaaacctccaggcttactctgattggactttatgatcatgttctgattggatgagagcaagtcttaacacaaccaatcacagcatgaaaataaagtccaatcagagtaggcctagaggtttttctctcatccaatcagaatatgtagtccaggaacggcatttgcataacctcggtatataaagcatggtgaggtcgcatcaggtcatttcaggctctgctgtgtcaagtcggggagcggctctttgctcagcttagagaactggaagaggccgcaaccttctgcctgctggaggctggaggatggatggagcctggagcctgggacactaccttgctgtggttggtggtggcgacagagcagtaagagggtggccggcagcaggagcttgtcctgctgggctggaggactaggagaaggaagaggcaccaccacatgctggaggctgaagcctggagtctgtgccaccatggctcgcctcgctgtggttggtggtgacgctggagactgcagctgggccacagtggtagaaatgtgatggggtaggtgagttttctgggctgccctgtacgcttctgggggcaagggttgggtgtccttttggtgatcactgctagaggccaccctgcctgtgtcagtggtctggttgggggcactctccagggttgcattgctggtagtggggcaggttggctggctatctggggctatactgcctgcggtggcaggggtggtggggggaggcagattgtgtacagtaatgtgtgctgctggtggctggtgaaggattaggggcactatcttctgctgcactgcccacagcagggggtgggttgggtggagttatctgggtctacaatgctggcagtggggggtggtttaggggcattgttgggtgctgcactgcctgtgactggggggtgcaccatcaggagctgaactgcccgtgatggggtggggggaggcgggtttgggatgctatctaatgcagcaacacccgtggctgggtcagattgtgggcactattgggtggtacactccctgaggtgtggggggagtgctttggggggggggcattggggttacattgcctgaaactgtagggtgtgttggatgtgctatccgggggctacactgctagtggcagggggcagattaggggtgctatgggggctacactgccagcagcattggtgagctgaggaggtggcagcagcagcgacagcagtggtctccttcttctggtggcctccaagtaagagatcgttctcctcttcccggactccagactctagaaggcaattttctcccgctcgagctagattgcacggcagggcccccacacccactgtggtttcccagcctgccgtcatgctctgtgttgcaaagaccacctaggactactgggcagggactagtaggcaccatgggggaagttggggacagggcactgtgggtggaggtgtcaggaatgggaaccagcccttgggtggggagggctggctgggtctgagtttctcctacttgggttccccgagaagggcaggcttggtggacccagcaattcctggccagctggacttggccaggggccagtttcagtgaaggcattcactctctccccaggccccagttcctggccagcttttgccagaaggagaggctggactttggaaggtgggtgtgagtgccttcaatgaaacggatccctgccacctagtcaccagcgtgacaagatgaggctctaacggttccactccctgagtcctgtcttgggcttttctggctttgcctgcccaactgctccaagccaggctgaaggaggagaaggaggagtcacctgtggtacggtcgagcagatgatgtggctctgcagcttgcctcatgtgtttggtggtggtgatggagaccgcagctcaactggagcagtaggagggcacccacggggaccaggcggtaggatcctggtagggtgggctgatacattgagggtgacagtggttgtattggcattggtgctagtggtggtagcagtaggaagtctggggaacgggaagcgggagtaggagcactgcagggcctatcccattctggggcggggaggaaactttaggtgctgtaacgaaggccttggtggcagtggtggtggtacatctagggcaaagaggagtcctcccccttttcctgcagtctctggagggtgccctcctcctgctggtgcctgagctaggcatgagtagcagcattatctcattcttaacaaaatttagggggtgactatttgtgtatccttttgcttgttttttgttgtgatactctgggagttactcaaattttatgaatggaggaggggataaaaggtatcataataggccttctaattcccacacctgttctttttcctttcttccattgtgtattttcttctcattttcttgttcctcttcattttcttttgctactgcttctgtctcatgtttgtattcttgtttctcctcctgtttttgtttttgttttataccaagcaacggccttaacacaccaaaactgagttgaaaataaaatacttgtcactgttgtattttttaaataactgatcccttactatgttttagaaatgaggaaaaaagtcagttgtataattagttacttgaatagctatgctttcataatcgtgttaatgcacttatgcctagtgttccattattgggacattacttatatcctactgctaaatgtcatcaacaaggtctgatttttcacttatgcaaaaattcaaaaaatggcaacctctggcataaatgggctaatgcattgtaagtgttattcaaggaatcaaaaaatgaagcatcacataaaatattagtagcaaacagccatttcatctctctcacatattttttctggagctatggaggagtcacaggggtaataagttctaatttatgagatgattaagtgaaccatattcccttcattttttttctctgccaccattttcaagagtattgtcatctgcatgagcaaacctggtttatcaccacatctttgcaagaggaaaaagaaagggggagaatcatgtataacgttgtaaggcaaagattcacaaccaaaaacaaggttttattaactttcgcctttaagaaccttcagtgtttagccctctttgattcctagtattactacctttggtatgaactctttttttaaactgatccactctagaagtttatgcattttgtatcatttttcaagccaacagaaatgtgtaaggcctataattctgacatttttagttatttttaaggctgtgagcatgtaagatagtgttcatatatggaagaatatgtataaataccactaggtagcttattttgaagagatagtatctaaatttttgtccagagtagattggttgcagtttcttaggtgtgtctcttaatacgttgcctcaatgttttaaagcatgtagaaatttgaacacagtttaacttcatatagtcctttgtttataggtttaatacttctaaagactgaagacatcacagctccctttaagattcagtaatattaataaaattttagaaatatagggttagaatccaacaaattcagaggaaaattgttaaattatatagctgtagagcaggaatgaaacccaggttctaagctctaagggggccatgaggtaccatacaggtgcatcagtgactgggcatagattcagcaaaattacaggatggttaagagagtgagctgtggagcccaactctatgtaaacatgaatttttaaactgcatggtgcctcagtttatccatctttacagtggggactgtagttaagtttttctcctcagttgtctgtcttgttgccactgttccctagtctgtcttgttaccactcagtgcccacatgagaggatctaaggtaatttctgacaggctgggactccttaaagaaaaatagaaggtgctacaaaacccattttaggagaaacttctgttgtcctcatggaacctcaagaacttcaggcagacaggtctctcaaactctaaggctctcctctgttttgctttgcgttatctgaccttttaagtttgggtgggaatcagaaatcagtcagggagagagatctagagaaagttgtggatatgaagatgtatttatgttaagaaaagttgtgaagcaaagaaatgttatataagagaggatcttgtatggcaaatttttgtcctaaagtagaatgactaattatgaaagagggaaataaaggaaaagtcagaaagttcatgtcatagatggtctgtggaagttgcgttagggttcataaaatgagaaagaaaaacttacaactgctagatcttttcctgtctagaagtgttgtgtatgtgatgtatatataaaggagccctaattacttggcttagaagaaaaggaaggttcttaaatattttgtcagaaaaatagaagctctaatgccttttatttcacatgacttcagtaatctttgggaaataaagacagtgttaaaatcattggtaaaaaaacatcaaaatttatccattttgtctaatttaagtcagaggttaaattttagaagtgctttaatgtcacaaattgtttgacttcggaaaattgttctgtttacctggtttggagctgttcaatttctaggtaagggctggggacaggtggaattagccatgtctcctggctatgctggaaagagtcagactttacctacagttctgtcttgtatcctatacgctgcacctggtacgttattaaaacttcctgctgcttctaatctcttgagttccacttaaaattttttcatcacttgaatactattccctgtactaaatttttccacaattaaatacttagaatcatttttgcccacttgacccaagcattagtgatatatctttaaaatacttataatgtgtcacaatatatttatcaaatgtagggaacggcatttttacttttgtcagcatttatgtagcaatgctatctcaagtatttttagtcatttaaatgttgcataatatgcttttgattcctttgtttctatgtaaataaatatgagatattcaataaatagtatcaatgtttcatttatagaatatatttattagggttatttttaaacactacatcatatttacttgttggctttataagttagaaataatattttggattaactgtgtgactcatgagagagggagtttgtgcaattataatctttacaaatttttacttgattttcaagacttacactgcaactgttagaacaaggtaataagcatatctattaatatcaactcttggctagacccaatgatagtgtaggaattaacataatttttcctgctaaaggtattggatttgttttgagagactgcagtttaaaatcattgacatagaaagtttaaaaattgttaaatttttaaaatgcctttaaaattgttttatagaaaaataattatcttggtttaccttgataggttttttttaataaggactagaccaagagaaagagagagtagtgataaatgtccaggtttccaagttgaaaagtgaaaatcagtgtattacaacagatggatttgatgtcaaattacaaatactgaaaacattatatgtaatctactagccagagtaattgtacaaggcaaagaaatgaaaggcatccaaatagcaaaggaaggggtgagattgtctctgttttctgaaaatgtaatcttaacataaagaaaatcttagactccaccaaaaaaaacccgttaaagctgataaacatattcagtaaagttgagagttacaaaattaacataaaaatagtattcttgtttctatacacccatgacaaactatctgaaaaataaattaataatgtaattccatttataatagcatcaaaacaaatatataagtaattaaaatactcaggagtaattttaatgaagggtgtgaaagatgtgtatactgaaaattatagcacattgatgaaagaagttgaaagtgacataaataaatagaaaaatatcccatatttatgaattcaaaaaataatattgtcaaaatttccgtgctacccaaaacaatctacagattaaatggaaccactatcaaattccaatgcccacagaaacagaaaaattagtcctaaaatctgtatggaaccacaaaagacgctgaaaaaaacaaagcaatcttgagcaaaaagaacaaatctggaggcatcagactacctgatctttgataaagcaaacaaaacataaagtggggaaaggacaccctattcaatatatggatggtgctgggataattggcaagcaacatgcagaaaaaggaaacagttcttcaaaaggttaaatatagatttaccacgtgactcagtaaattcactcctgtgtatacaccaaaaaaaattaaaacaaatgcctacacaaaaagtagcatacaagtatttatagcaacaaaaagtaggaaacaacagaaatgttcatcaactgaggagtagattaatgaaatgtggtctgtccataaaatattatattggcaatgaaaaagaaaaaggtattaatacatgctgcaaaaaggataaacattgaaaacatggtaagtgaaagtagtgagtcgcacgtaactatatattattatgattccgcttacatgaaatgtctaggataggcaaatccttccagaataggcaaatccttaggaagtagatggatggttgcctagggctgggaggggtttaaagaaagagtggggaaaatggggaaagattgctaatgggtgcaaggtttcttttaaggagcatgaaaatgttctaaaattatattgtggtgattgcgtatccacctagttaatgccctaaaaaaattgaattttatactttatatgagtgaattaaataatatataaattatatctcaatgaacctgtgaaaaaagttaaaaaatatgtgatatgcatacacaaaatttcttcattttattttgtttccataggtttttggggaacaggtggcgtttgattgtaagagtaagttccttagaggtaggtgattaatgagattttgatgcacccaacacctatgcagtatacactgtccaacttgtagtcttttattcctcatgccccacaccctttctcccaagtccccaaagtccattgtagtattctaatgcctttgcatcctcatagcttagttcccacttacaagcgagggcatacgatgtttggttttccattctgacattattacttcacttagaataatagtctctgattccacccaggttgctgtgaatcccattttttttccttttgtggctgaatagtattcatacatatatatatatatatatatatatatcacaatttcttaatctacttattgatgggcatttgggctggttacatatttttgcaattgtgaattgtgctgctataaacatgcatgtgcaagcacctttttcatataatgacttcttttcctctgggtagatacccagtaatggaattgctggattaaatggtagttctacttttgttctttaagaaatctgcacactgtttaccatagtggctgtactagtttacattcccaccagcagtgtaaaagtgttcccttttcaccacatgcccaccaatatttattattttttgatgttttgattatgaccattcttgcaggagtaaggtggcatggctttttttttttttttttttgatagagtttgttgccaggttggagtgcaacctctgccccctgagttcaagtgattctcctgtctcagcctcccaagtagctgggactagaggtgcctgccaccacactcgactaatttttgtgtttttagtagagataggttttcaccatgttggccaagatggtcgtcgatctcttgacctcgggatccacccatctcaggctcccaaactgctggggtttcaggcgtgagctgcgagccaccacgcccggcccagcaccagcattctggtttcgattaacgtatctctgatcattagtgatgttgagcattttttcatatatttgttggccattttttatatcttcttttgagaattgtctattcaagtccttagaccattatttgaatggattgggggttttttttctgctaatttgtctgagttccttgtagattctggatattagtcctttgtcagatgtatagattgtgaagatattctcccattctgtgggttgtctgtttactctgctaattgtttctctggctgtgcagaaactttttggtttaattaagtctcacctgtttatcttcattttgttgttgtcgcacttgctttagggttcttgatcatgaagtctttgcctaagccagtgtctagaagggtttttccaatgttatcttctataatttttatggtttcaggtctcaggtttaagttgatctttgtttaaggtaagaagtgagatacccattgtttctcttttaatacatttaaaacaagcaaaccttctacccagtttagatttattattcttcattgattgtttcattctcttggagaacattctggcagtaaagtaatagatacattgcatccatcattgtgtgtcaaaaggccatcaggtcgatggctctttttgaactatgttgtttcagaaaaccatagctgagtattataggcagaagtttgacattttctttgtttttttttttaattttattttattattattatactttaagttttagggtacatgtgcacaatgtgcagggtagttacatatgtatacatgtgccatgctgatgtgcagcccccattaactggtcatttagcattaggtatatctcctaatgctatccctcccccctccccccaccacacaacagtccccagagtgtgatgttccccttcctgtgtccatgtgttctcattgttcaattcccacctatgagtgagaatatgtggtgtttggtttttttgttcttgcgatagtcaattgacttttacgtgtttctgaagtgaggcttgtgcttcaattgcagaagaaatagcttttataatattggagaaacaaaatagaaattaatataaaatttggataacaatagcttcaatgaaagtgagaattgtattttagtggtattataatattttaaatccattgaaatagaatctgaaatagaaatttatggaaaaaggtacagaaatagaataatgtctaccaaatcaaggtagtaatgaataaaatttacacataaaaactcagaactggaacatgtttaaggaaatcaaatattattaaagaagaaatatataactgtaatttgcaatttatgatatacatatatgttatgtgtatataaacacatgactgcttattatacttgcttaatttatctcttgctcctggctccagaaaaaatgaaaaaactcttttgtccatgagtatatgaatagcatttatcataaagctgtggcaaagtaggcatttaatagtatttgatactgaatatgttaaaatactaaaaataaaaatacttttaccattttatactttttaatgtttaaaatgctgttttgcagggggatttgtggagttttgttttttttttttttagttaaaacaaatttactcctttattttcgctaacttctaaaagaaatttagcacttccttcagttatgaatgtaaacaaaagacagtggcagtatctctgattttgtcatcaacaggtatcgcagatattttcatgtcatattacagatttgtagacatcttgaaatactgtttaatcgttatcactatttttttttattaaagttttagggtacatgtgcacattgtgcaggttagttacatatgtatacatgtgccatgctggtgcgctgcacccaccaactcgtcatctagcattaggtatatctcccaatgctatccctcccccctctccccaccccacaacagtccccagagtgtgatattccccttcctgtgtccatgtgatttcattgttcaattcccacttatgagtgagaatatgcggtgtttggttttttgttcttgtgatagtttactgagaatgatgacttccaatttcatccatgtccctacaaaggacatgaactcatccttttttatagctgcatagtattccatggtgtatatgtgccacattttcttaatccagtctatcattgttggacatttgggttggttccaagtctttggtattgtgaataatgccacaataaacatacgtgtgcatgtgtctttatagcagcatgatttatagtcctttgggtatatacccagtaatgggacgactgggtcaaatggtacttccagttctagatccccctgaggaatcgccacactgacttccacaatggttgaactagtttacagtcccaccaacagtgtaaaagtgttcctatttctccacatcctctccagcacgtgttgtttcctgactttttaatgattgccattctaactggtgtgagatggtatctcattgtggttttgatttccattgctctgatggccagtgatgatgagcattttttcatttgttttttggctgcataaatgtcttcttttgagaagtgtctgttcatgtccttcatccactttttgatggggttgtttgtttttttcttgtaaatttgtttgagttcattgtagattctggatattagccctttgtcagatgagttgattgcgaaaattttctcccattttgtaggttgcctgttctctctgatggtagtttcttttgctgtgcagaagctctttagtttaattagatcccatttgtcagttttggcttttgttgccattgcttttggggtttgagacatgaagtccttgcccatgcctatgtcctgaatggtaaagcctaggttttcttcaacggtttttaaggttttaggtccaacgtttaagtctttaatccatcttgaattgatttttctataaggtgtaaggaagggatccagtttcagctttctacatatggctagcctgttttcccagcaccatttatgaaacagggaatcctctccccattgcttgtttttctcaggtttgtcaaagatcagatagttgtagatatgcggcgttatttctgagggctctgttctgttccattgatctatatctctgttttggtaccagtaccaggctgttttggttactgtagccttgtagtatagtttgaagtcaggtagtgtgatgcctccagctttgttcctttggcttaggattgacttggtgatgcgggctcttttttggttccatatgaactttaaagtcgttttttccaattctgtgaagaaaggcattggtagcttgatggggatggcattgaatctgtaaattaccttgggcagtatggccattttcacgatattgattcttcctacccatgagcatggaatgttcttccatttgtttgtatcctcttttatttccttgagaagtggtttgtagttctccttgaagaggtccttcacatcccttgtaagttggattcctaggtaatttattctctttgaagcagttgtgaatgggagttcactcatgatttggctctctgtttgtctgttattggtgtataagaatgcttgtgatttttgtacattgattttgtatcctgagactttgctgaagttgcttatcagcttaaggagattttgggctgagacaatggggttttctagatatacaatcatgtcatctgcaaacagggacaatttaacttccttttctcctaattgaataccctttatttccttctcctgcctaattgctctggccagaacttccaacactatgttgaataggagtggtgagagagggcaccctgtcttgtgccagttttcaaagggaatgcttccagtttttgcccattcagtatgatattggctgtgggtttgtcatagatagctcttatgattttgagatacgtcccatcaatacctaatttattgagagtttttagcatgaagggttgttgaaatttgtcaaagtccttttctgcatctattgagataatcatctggtttttgtccttggctctgtttatatgctggattacatttattgatttgtgtatattgaaccagccttgcatcccagggatgaagcccacttgatcatggtggataagctttttgacgtgctgctggactcggtttgccagtattttattgaggatttttgcatcgatgctcatcaaggatattggtgtaaaattctctttttttcttgtgtctctgccaggctttggtatcagaatgatgctggcctcataaaatgagttagagaggattccctctttttctattgattggaatagtttcagaaggaatggtaccagttcctccttgtacctctggtagaattcggctgtgaatccatctggccctggactctttttggttggtaagctattgattattgccacaatttcagatccagttattggtctattcagagatttaacttcttcctggtttagtctttgagggtgtatgtgtcgaggaatttatccatttcttctagattttctagtttacttgcataaaggtgtttgtagtattctctgatggtagtttgtatttctgtgggatcggtggtgatatcccctttatcattttttattgcgtctatttgattcttctctctttttttctttattagtcttgctagcggtctatcaattttgtggatcctttcaaaaaaccagctcctggattcattaattttttgaagggtttttgtgtctctatttccttcagttctgctctgattttagttatttcttgccttctgctagcttttgaatgtgtttgctcttgcttttctagttcttttaattgtgatgttagggtgtcaattttggatctttcctgctttctcttgggggcatttagtgctataaatttccctctacacactgctttgaatgcatcccagagattctggtatattgtgtctttgttctcattggtttcaaagaacatctttatttctgccttcatttcgttatgtacccagtagtcattcaggagcaggttgttcagtttccatgtagttgagcggttttgagtgagattcttaatcctgagttctagtttgtttgcacagtggtctgagagagagtttgttataatttctgttcttttacatttgctgaggagagctttacttccaagtatgtggtcaattttggaataggtgtggtatggtgctgaaaaaaatgtatattctgttgatttggggtggagagttctgtagatgtctattaggtccgcttggtgcagagctaagttcaattcctgggtatccttgttgactttctgtctcgttgatctgtctaatgttgacagtggggtgttaaagtctcccattattaatgtgtgggagtctgtctctttgtaggtcactcaggacttgctttatgaatctgggtgctcctgtattgggtgcatatatattcaggatagttagctcttcttgttgaattgatccctttaccattatgtaatggccttctttgtctcttttgatctttgttggtttaaagtctgttttatcagagactaggattgcaacccctgcctttttttgttttccatttgcttggtagatcttcctccatccctttattttgagcctatgtgtgtctctgcacgtgagatgggtttcctgaacacagcacactgatgggtcttgactctttatccaatttgccagtctgtgtcttttaattggagcatttagtccttttacatttaaagttaatattgttatgtgtgaatttgatcctgtcattatgatgttagctggttattttgctcgttagttgatgcagtttcttcctagtctcgatggtctttacattttggcatgattttgcagtgactggtaccggttgttcctttccatgtttagtgcttccttcaggagctcttttagggcaggcctggtggtgacaaaatctctcagcatttgcttatctgtaaagtattttatttctccttcacttatgaagcttagtttggctggatatgaaattctgggttgaaaattcttttctttaagaatgttgaatattggcccccactctcttctggcgtgtagggtttctgctgagagatccgctattagtctgatgggcttccctttgagggtaacctgacctttctctctggctgcccttaacattttttccttcatttcaactttggtgaatctgacaattatgtgtcttggagttgctcttcttgaggagtatctttgtggcgttctctgtatttcctgaatctgaacgttggcctgccttgctagattggggaagttctcctggataatatcctgcagagtgttttccaacttggtttcattctccccatcgctttcaggtaccccagtcagatgtagatttggtcttttcacatagtcccatatttcttggaggctttgctcatttctttttattctttcttctctaaacttcccttcttgctttgtttcattcatttcatcttccatcgctgataccctttcttccaattgatcacgtcagctcctgaggcttctgcattcttcacgtacttctggagccttggttttcagctccatcagcatctttaagcacttctctgtattgattattctagttatacagtcttctaaatttttttcaaagttttcaacttctttgcctttggtttgaatgtcctcctgtagctcagagtaatttgatcgtctgaagccttcttctctcagctcgtcaaagtcattctctgtccagctttgttccgttgctggtgaggaactgcgttcctttggaggaggagaggcactttgctttttagagtttccagtttttctgttctgttttttccccatctttgtggttttatctacttttggtctttgatgatggtgatgtacagatgggtttttggtgtggatgtcctttctgtttgttagttttctttctaacagacaggaccctcagctacatgtctgttggaataccctgccgtgtgaggtgtcagtgtgcccctgctggggggtgcctcccagttaggctgctcgggggtcaggggtcagggacccacttgaggaggcagtctgcccgttctcagatctccagctgcatgctgggagaaccactgctctcttcaaagctgtcagacagggacatttaagtctgcagaggttactgctgtctttttgtttgtgccctgctcccagaggtggagcctacagaggcaggcaggcctccttgagctgtggtgggctccacccagttggagtttccgggctgctttgtttacctaagcaagcctgggcaatggtgggcgcccctcccccagcctcgctgccgccttgcagtttgatctcagactgctgtgctagcaatcagcgagactccgtgggcgtaggaccctctgagccaggtgcgggatgtaatctcctggtgcgccgtttttcaagcccgtcggaaaagcgcagtattcgggtgggagtgacccgattttccaggtgccgtcggtcacccctttctttgactcggaaagggaactccctgaccccttgcacttcccaagtgaggcaatgcctcgccctgcttcagctggcacacggtgcgcacacccactgacctgcgcccgctgtctggcacttcctagtgagatgaaccgggtacctcagatggaaatggagaaatcaccgtcttctgcgtcgctcacgctgggagctgtagaccggagcttttcctattcggccatcttggctcctcccccgtggagatttttttaaataaagatttgaaataactttctcttttagtaataataaattatattttaaataatatgctcaagttttaaaagtgctgtaagtccttctctgtgtacctaagacatttctgtgtcactacacttaaaaggatatgaggctgagccttcagctttatatttttcaaccatgattttattcctcatacatgcatatttacatttctatgtaacaatatatttcagatataattttttcatgcaaaaaatcacatgagattgttttaaaattatgatttcattgtttgatgagtatacaaaatcatgaaaagaatacttgaaaagagaaaattttcatgtccccaagattcttgctatttagagttcaggtgagtttatgatgaactttctttcaggccattcaaataaaaatgtagcacaaatagcttattatttaataattattaataccatataggttcatatgttttcatatgcacaactagatagatgacagatagataaatagataattatagaccagtatcgatatttccaatacaaacactctaatatgtgacagttctcaattctctacccttctgtataataaattccttgaaggattagagtaagtattctacacgtactccttttcaatccacttgcatagtaagagtgtgtacaaatgatgactaataatgatgaggccattttgattcagtttcatcagaggtgtaaaatggtagtcatgaaaaacataagacatctttaatttttcctttttgagattttgtggatttgtttttgtcctgacattagtacaaagaaaatctgtttctctcctcggacaattaaaatactgttgttatgtaataaatcaacaagaacacaaattatgaaaattatgaaaaacgttggtaattttgcagaaatatcctcaatacatatttcaattacttaacctttctaagatgttactttttttactccaattgtattacttatttttcttacagcattttgtatatcttatgtatctgtttaaaattcttatcataattatattaaataaatatctctaacataaattattcaaaacaacattttaccttgataggtattattaatgatgttctcaattgtcttaacaggtcaaggaaacaaaacattgaccaaaaagaatattaaaaaaatcaataaattttattttgaataggtgaaacccagttataccactgactgacaaaatatgagataaagttcctttagtatctttactcaagtactgcaactttatttgtcagatattttttctcatgtaaaggcttaagttgtgtaataccagagactgagactcaaacttgagtctgactccacagccatagtaggctttactgcatcatgctgcctcaccattgacaataggaaggcctctggtctggggttatgttaccagaaaggggttccaatccagaccccaagagagggttcttgatccttgtacaagaatttatttattaagaaagtaaaggaataaagaattgctactccataggcaagcagtggcgtgggctgcttaactgagtatacttatagttatttcttgatcatgtgctaatcgaggggtagattattcaagagtgttccaggaaaggggtggggtgggcaattcctggaattgaggttcctccctgctgttttagaccatatagggcaacttccaaatgttgccatggcatttgtaagctctcatggctctggtgggagtgtctttcagcatgctaatgcattataattagctaataatgagtactgacgatgaccagaggtgactttcttcaccatcttggtttgggcatgttttggcagcttctttaccataatctgttttatcagcaggatttttgtgacttgtactttgagctaacatcctatctcatcctgtgactaagaatgtctaatcccctggatatgcagcccaacaggtctcagccttatttttcccagcccctcttcataatggagtatctttggttcaaatgcctctgataaaaccaataagttttcatgatgtataaatctgaggctgtgggtctttatatattgaatataactttgtgagatagtcctaagtagtctctttggagtacacatgcatcaacataattataattccttacggacctatctgaccacccaatgggttcatcttgcccagatatagctgatttatcaagagaggggagttgcaatagagagagtttaatacatgtagagctggctaaatgggagactaaagttttattactactcaaatcagcctcccacaaaatgtggaggctagggcttttcaagggcagtttggcaggcagagggctaggaaaattgctgattggttgataaggtgtacaaaatggtccttctggactgagtgtgcttctgagttggagccacagagtagtccctggcctaggtggagtcatcaggttttcagaaatgcaaaagtctgtaaaaacaccttaaaaagccaatcttaggttctaaaatagtgatgttaattacagaaataattagagaagttgcagatcttgtaacctctagaacaatgactggtaattgtttaagcctaagttgtgtaatactaagcagagggactgagactcaaacctgggtctgacttcacagccatagtaggttctactgcatcatgctgcctctccattgacagtaggaagacatatggtctgaggttatataaccagagagaggtcgcaatccagaccccaagacaggggtcttagcaatattcaggcccctctcagcctcctaacctggtggactttcattagttttacaaaggcagtttagtttctgggaagggctattatcatgtaaactataaactaaatttctcccaaagttagcttggcccatgcccaggaatgactaagagcaatttagaggttaaaggcaagatggagtaggttaggtcagatctctttcactgtcataattttctccctgttaccatttttgcaaaggcagtttcactactgttcggttaaatgaatttgatcactaaataatttgtgcaatcttctaaaactggaaaaaaatacattttgatttagtacctttttacatcaacactatgtttattcaagttaaagaaacatagttattttagaagggatataaatgagaccaaccatagtttctaagggaaaacattgaggttaaggaaagcagtaatttaagaactataagaaaatacagaaagttctacatctaatggaatttataattgtgtgatctatccacattaatatatctaaagtctggtattcctgactccatttaaattagattaaataatttaagtccaacatcgtagattcccctcaagtacatttgctgctgttttgatgttaattatccacatcactcagataattaccacctaacttgtttatagcacaaggtatgctgtaactttttatctcaaggaagcttaagtatttcttttatcatgggccagagcagttttcaatgtcacttaattgtgtcctagaaaattactagaataataagcacattcacagggttaaatattaacagatgaggcaattactttaagggaaaactgcaaatcattttaacaattcttttcttgcacttttttaaagcagcatttgccaaatgcgatcctcagatcacttagcctgagaagataacgtctgttaaaaatttttctatggtgaaaataattttgacagctcaggaaaatgatatgaaaatttgtaatagtaatcaaagggttagagaagttctgccatcaagaaaaatgctaaaaacttgtttttctaatattgttttataaccttcctaataacagtttgcagagtttttctataaagggcaagagggtaaatagtttgggctttgtaggctgtatgggtctctctggcatctactcaactcttcctttatagtgcaaaagcagacttagatataacagaaacaaatacgtggctgggttccaatacaactttatcaaatcagcccactgggctggatttggcctgtgtgctggaattttccaacccccgacaatattatgcagaggtagtttttaaaaatgtctgatttggaaatctctgttttagattttatacataaatatcaaactctctaaaattgtatctacaagatagcccttcctctttgcttactctcattcttgagaaatttgtagcagtagaggagggcatgaagaagggaatcactttttgcagagaataaactctttcagccttggtacccatagctatcccaccactatcacctttgtgctatatactgtatgactaaggaaaatgagtcacatactcttcctgccctcaaggagctagctgtatggtctactgggagtgagggtgataattttgcaaatgacaaggaatgtgtctactccacataatagtacaataaaatgtgtgatattaatgccacatgagcagtaacaatttccccaaggggattaaaaggaagaacataattttggttacaagtaccaggcaaggctttaaatgagagataatgcaggcaaggctttaaataagagatattgctgtagataagcttgtaaagagtattcctagtcatcaacaggcagcactgcagaggagaaaattgtgagaaagtattgctgctagatggaaaagcataaataaggaaaaggaggtggcaatggtagcaaatagtcacttagcaggagcatatagtgttagtctgaaaagtcagtctgcatcaacaagatacttataaggtaccatatacttgatccaacagaaatgcaaaggtgctgaagaacgttagcatgatagggaccccttttattctttgattgaggggtgcccatttgcacttaggtaagaatggtgcatatttaaaatgcctgatgatgctgttaatattgtctgtcctaagtagtgacatagcacatgtgttaagtagtttcaagagttttggggaccaaaaaagcattatttggatatttcagatgtgaatgaatataaacaacagtaaaacctacaacacctcccttccctctgcctccacctcccaccaagacaaatccagaggatggcagttgctagtgtgttttcagtagtgcaaacatgtcagggctgcctcccggattgctttcaactttcctttaggtggacagattactgctggctctctagtcattgtgctcagatttaaagcaagaaaaaagtaaaatctgcacgaaagcttgcttctttactgtgagaaagccaaactttctcagaagcacaaatttttacattgatattttatgacccagaactggatgacagggccacttctcactgctagtgaaacagagaaaaaattatttggctttctctttcatgtgggaattgaaagggtagaagaagatttagagtagctttaaagatgcctaaaggtgtccaaataaatgtttaagtattttatgagaaagttcagaagcacctaagagttttaggcaaactacatcatatatttatttttcaccttaataaatataacctgataattttattgagagaggaaaaaaactgtcttttgcaaaaggataaacaaagatgtaatatatatgttttatatataatatctttatatatatttctttatatatacatacacataatatataatgtctatatataatatagatatatcttaaatatatctttataaagatatgtaattatatatctttatatatctctttaagacgtatatatatatttacacatttacaaaacacagtttttcttttctctctcaataaatttaccaggttatatttattttgtcacatcctagcctaacaaatcttgttttgtgtgtgtgtgtgtgtgtgtgtgtgtgtgtgtgtgtatcatagatctttatatagtgtatatataggtagatctagatatatatctttataatatatataatttgtttgtatgcatatatatgtgtgtgtatatatatatacacacacatacatatatatgataatcttacctcctaaaggaaatttgaagagatatgtataactatatatagatacaactggatttattagtctaggatgtgacaaaatattcaatttgaaactgtattagcagctttttagatttcatttatgagtggtgcattataatatgaaggagttgtaaaacttttaaggattttgcagtccgaagatatgaaatataatcccaagtccaccattcactagctatttgtctgtactaaagtcatttagccactaaggacatcagcctccctttcatcatttttaaaatgaggataataataactgcccttcacactgtgtaggtttgttgcaaggcccaaatgaggtgatatttttaaaattgcttcatcaacaacaaaacactctcgcacttctctctctgtcttgatctctctttctctctctcttctccctccctctctccctctctttctgacacacatatcccacacacatttccacataaagctccccgctcaatcccttgagattataaatgccatcacagaaatatatcaagtgcctctgacagcttctggcttctgttgctcactttgtttttttctttctttttttttctttttttacttagaacaaattgaatcatgctattaggtaccacttctttaatgatttcatctatttgtcacttcaaaaggttttatttttgaccccaggccctctgaaagcctgtcagatataatcagctgttattcaatttgtctgaatattgaggttcataccacaactagagaaactggtagtggaggcacttctgtcttggaatataatcaatggctgaaataactttgtcattaagaatgaagatttcccctcacaaggtaacagaggatttggaaatctttaaaatgtggaatttcaataatattattccccatcactcctacctaccactttacttctgtctcacatctgtttacacctaacacattagtggaatcccaaagcattagtatccacataccagatcagaaatccaaacccagcactcattaccactagctgcatataacatttttataattattaagttgccactctagaagagaagaaatgtaatttgtatacatacaaatgtgtgtgtgtgtgtataagacatgcatttcttcacttctagagtggcaacttaatacttataaaagatatatgtatatatatatatatatacgtacacacatatttgtatgattttgaatgtaaattgttttggagctatagagcgtaataaatttaccaatagtttgcataatatttatgtatttatgttaatatatttttaatgattttatatatatagatagaatgactgccttcacatatgtgttaagatactttattgtaaaagtaataaaaacataactaaaattgccacacagaatatagcatattcattggcttatgaatctgaaggtctagaattcctctcaggcttcaggcaaggactgacccaagagtttagcggtattactatctgccagcttttacttcattgatcatgacttcattttaagacagtcttccctcataatctcagtctatcctattccactttcaaatttatatgcataacactttcaacagtcaccaacccctctctgtttagcccaccattgtaacatacccatttctgaacaaatagatgattgtgtgtattgcttattgacttagcttaggttacaaactccccctctggaataaggtcattatcatcttacccataatcacagtgatctctagagattgcaactactgaaatcagaaagatgcagagtgggaataagtaaaacctattctaataataaaagagtaaattttacatgtgcacataggtatatttattgtctggattctaattcctgatgcaaagaataaagacagattctcccatgagtgaataaaataaattttttttcatgaactattaggttaagacacataaaactgccacatggaggtgccaattggtcaaaacgcagcaacttcatactgttcaacctaaaagaaggccgccgtagggaaaactggccacagttgctttacctatactaaagaccacgaccatcagtacatgtaatatcctccattgtttccctagcttatttaatatatctgtgtggcaatgatctcattcgttttcctaaaattatatgtttaattttttcaaaagttgctatagcaagatagaaacctcctaaagctgaatatcccttgaatgcgtcattggtatattttagcctcaagcttcacatgaaggatcattatccatacatatattttgcagatgtaaattatttgtctgtgcagtggattggagtgtaggtcctttgtatgtatgaaatagacccctttatttctgggaaaacattgttctcttcgtgggtttcctgtgatcacgtgttgttgctatccacgtgtaggtcttctctgaactcctgtaggatgattcggccccagctctggttttgttgactgctgaatcatgtaaatggagccttagtgaaaaatatctctattgaaatgccttgtcagaaatcaataatagctgatctttacagcaaaatacataccaaaagctggttttacaaaacattatgtaaggatgattgcttctttattttgtatagacatactatgtgcactgaattgtcagctcactcatcagggacttgatgagtacttctggcatctttgggatagtttcatgtagacaaaccctttaagggaaaagccccaataattatgtttctgtttctatcaaaggaaaacaagatagcctatactacaaaataggtataggttggctgggcgtggtggctcatgcctttaatcccagcactttggatggccgaggcgggcagatcacgaggtcaggagatccgagatcatcctggctaacacagtgaaaccccgtctctactaaaaaaattcaaaaaaattagccgggcgtgctggtgggtgcctgtagtcccagctccccaggatgctgaggcagaggaatggcgtgaacctgggaggcagagcttgcagggagccgagatcacaccactgcactccagcctgggcgacagagcgagaccccgtctcaaaacaaaacaaaaaaaggtataggtcattgtcactattggcagggagctagaaatcatgcatgggagtgaattctaaagatgttagacaatgggcaacaaaatacaaaacttgctgaagctgaattcttttgcacaaatgcattcaccctgaattcagggtgtgatgttttggctaccacaatgaaaagtggcattaatagtcagctagattagctaactgaaaccaagtctcagtaatagcttatagttaatgaagtcaaaatgtctgaacttttacagcacattataaaacaaggttctcaaatttcagcaagcatcagggtgatatgcatggctattttattttaagacagagtctcactctgtcgcccaggctggagtgcaatggtgcaatctgcaacctctgcctcccaggctccagagattttcttcccttagcctcctaagtagctgggattacaggtgcccaccaccatgcctgggtaatatttttttatttttatttttagtggaggcggggtttcaccatgtttgccaggctggtttcgaactcctgacttcaagtgatccacccgcctctgcctcccaaagtgctgggattacaggcatgagccaccatgcccagcttcatggatggctatttaaacacagattgctgaattgggatctctgagtttctaatgcaatagtttgggatggagccgcaaatatggattttgaacaagctctcatgcaaagatgatgcttatgtcaggggaccacactttagaaacactgtgataaagcctactttcataaagtgagacacatagacaagcagcatcaactagaaggctctaccctcctaccctatatctactaaatcagaagttataattctaacaagatctctaggtgattcatgtgcacattaaagttgagaagccctactttagaggagtttaaaatttcagagtgatggaaatgtgcaatgaatttatcttcatgtgtaatctgagaaaccagttttttatctatacacttctaagataaccagaggacacgcacttcagcaagatttaacaagtatattggtaaaggggcatcctgctcttccttgaagagccctacagtctgttttcattttttttctctgtagattagggatgtcagtgggggatgctgtaacagaatgggcttcctgttctcaataggaataaataaatgatcctgtgtgtaaagtgctcatagtgacctagatgggattaatatgtgggctcaacaagatagcattactaaggctaatctgattacctctgttgctgttactcaatgtgccagtaatagaacccaaatctgaatccctaatatggtatcattcctcagggaaccagctcactgaccagtggcattaaacccacttttaccacggaggagggtccttatatggataaatattattcagtatggatttgtgttacttgtctgtagatcttctacctgaaacaacattcatatgttcagagaacatctttccaatgcttttgatcattatctggtggacataccacctcatttccaacaaggtgatttattttaacgtgaagaatcatagcaaagagctcacaccacagacaaatccaataatgtttctaaaatgcctaccattcagaagcagctagcacaagaagatggtaggatagaattcttaattcttagataactgctagtagaagatgaacttcaatgaggtttggtcattctcttacagtatgtggcatatgctttaaattagaggtcacaaaggcatgccctctcctgaatagctatgcaggagatggcatgacataacagagcctggacaacttgaagtgaagatgaaagtgatctctcttgctatcttacttaataatctgtgaataattttggctttcttgtctgtgaccttcagttgggtgacatttgagttctaggaccagaagttgaaagctttgatgatgaaactcagccattgttctgactaattggaagctcagattgtcctctggccatttttggacccttcatgctgatgaacgtttgaacagagaaaaggctttccatacttatgggggataattggccctaatgccttctagcaaatacaataaggacaactgaaggaagaggaacagatgtaaacatatctgagtgtacagttcagtgatattaagtatattcatatggttgtgcaacctttaccaccacctatttctagaactctatttatcttgcaaaactaaaactctataccattcatcaataactcctcattacaccctccccaagtcgttggtaaccaccattctactttatcaatgattttgactactttaagtaccccataaaagtgtgttaccaaaacaccagggatttggtctaggtcctgctgtttgacacacgaactcaatcactgagacgatgaatattgccaatgaagaaggttttaatcaggtgatacagccaaggagatgggagctgtctcaaattcatctccctgactgatgaaaactaggggtttatatagtagggaagaaatgcaataatgtgcaagaaacaggaattacagagggacaaggaagcaagaataatgaatgagggatcctgcatctcattgtctggatgtggttatatggtgagtttcagttctttgatactttgagaggcctgaagatcattttgtaaatttcaaacttgcagatcagaaaagtaaacacctatgtttatttaaaaatatatggaagtattgggtcattttcaagtataatcatgccatatttgtcttttcatgagtggcttatttaacttagcataccagcctcactcttgatccatgttgtagcatgtgtcagaatttccttctttttcaaggctgaacgatattccttttgtgtatataccacattttgtttattgatttatccatggatggatgcttaatttgcttccaagttttagctattgtgaatgatgctgccaggaacacgggtatataagtacctcttccagagactgctttcaagtcttttgagtacatactcagaagtaaaatggctgaatcacatggtaatactgtttttaatttttgaggaaacataacgttttccacagtttccatgtgattttattttaaactttcaattttttaataaaaattgtatatatttcttttgtaaaacatgatgttttgatatgcgtatgtattgtagaatggttaaatcaagccaactaacaaatgtattacctcacttattttattgtacagacagcacttaaaatctactctcttaacaattttcaagtgtacaatacattgttattaactatagttactaggatgcaaaattaatctcttgaacttgcttcttttgtgtaactgaaattttgggctgcaccactttgccttccaaccaacagcgcactagtgtttcaatttctccacatgctcaccaacacttgctattttttaggttttttgtctagtagccatcctaatgaacgtgaggtggtttattattttagttttcattttcatttccccaatgattagtgatgttcaccatctttttgtgtgtttattatttgtatattttctttgaaaacatatcgattcaagttctttacacacttttcaatcagatcatttgttttcttgtaggatttcagaaggtctttatatattctgcataacaatgcctgtttatagtgggaaaaagttatgttgagaaagtagataatcactttcaggtggctctctgattaatatttgaataatattatgtaaaaataaaacatattaaaatatctgcttattattatatgaagttaaacaatcttcctctttcttaaatacactgtgtgtagaaaaccctaaagcaaacttgtccaacctacgaccagcaggccacatgcagcctaggacaactttgaatgtggcccaacacaaatttataaactttcttaaaacattatgagattattttttgggattttttttgtagctcatcagctatcgctagtgttagtgtattatctgtgtggcccaaaacaattcttcttctttcactgtggcctagggaagccaaaatattgggcatccctgccctaaagattctacacacacacacacacacacacacgcgcacacacacaactaataactaaattcagcaaagtagtaattacaaaaccaatgcacaaaaatcagttgtacttgtatacctaacaattaataagctaagaaagacattaagagaatagttcagtttacaatagcatcaaaaagaataaaacacataggaattaatttaaccaaggaggtgaaacatttatgcaatgattattagaaaatatttttgaaagtaaagtactttgtcaggctttaaaatagcttcttcaatgtgtaaaatgattttcatcatcttacagaccaaatgaataaaatgacctttagaaaatatctgaaagaatcttaatttagtttagtttatttatttgattttttaaaaagggcaagtacctgtgctattgaaaaggaatacgacttagaaagtttacttcatttgcagttagagtacattaaattaaatttgtttggctggattaccctctcaaatgataagcctatcagaaaactttgaacatttgagtactctttagttaattacatttgtggtgctttaattatcaaacttaagcttatttatttttctacaataggcactgccatagaaaaaaatgacagaatttagtcttaatacttgcccacttttacatgaaaaaagcaaagtgtgcttgagcacgtatggttattaaatatgtcctccaattaattgtttccagaagcaaattgcctatagaaacaaaacatttttctgtaacagttctaattcacatgtagtatagtcataacatccttctgttttattattttcaataacttcttaaagaattttcccttattgtttacagaattgttaatctgaatgattttataggtgagaaaacagatttaaccgtagggttacggcaacttagaattctcctagaggtactgaaaaaccacattttctattgtacaaatttatctacggaataaaaagttttaaatatcttatattaaaaattaaatctgaaatcagaggagaaatgggggaggattatgatgtgagctttctctctgcctagaatataggcagatcaaccagaaactcaaaaaataaaataaatggagttgttgaaatatgtttgttgattcactactactagttaattccacatccatttcttaaacttattctttaccttatgtaattctgtttgttgtcctacagtcaattaggtgcttttgtttattttttgaatatgtgggttgtctttgcatggaatattgcttgggttttaactaatattaaatatgtataaatgacatagataaaatcaaaatcatatttgaccataaaatgtaaacattttcattcctgttatgaacataggaagactgaaaaactaaggcaaaacactttagtttgttctgtgattaaagttctatttaactcataagcttaacaaacttacttcccttatccaaagtactatatatgcaatctttaataattaaactactgtgatgttgataaatttaatacaaactcttcaaacatgtaaaaaggtaggcaagcatacccaagaggattttttttctcaaggcacttaatcaattctttcaatctaatcaatcacacttacaaatttactgaatcgaattatttaaaactgaaatggtgtttaaaagcttagtcaaaatttttatattttaaatcacatatctaacaacaactactttctacagttgcattttcactaaaaaaaggaatttcacaagttgaaatgaagttttagttaaaaaaaagggggggatcttcagcttggtagagatttaatttcttggttagggaattgaagaaaaacccaaaatttgaggtttataattgattctaatggagacacaggttaagaggttgagctttttcatcaagtagggcttttttggcttttatcttttcaaatcaatctttcatatacattttaaaactatatttttggctgggctcagtagctcacacctgtaatcccagcactttgggaggccatggtggatggatcacttgaggtcaggggttcaagaccagcctggccaatgtggtgaaaccccgtctccactaaaaaaaaagaaaaaaaaaattaactggttgtggtggcaggcacctgtaatcccagctactagtgaagctgagtcacaagaattgcttgaacccaggaaacagaggttgcagtgagccgagattgcgccactgcactccagcctgggcaacagagcaagactctgtcaaaaaaaaaaatcaacaatatttctttctttgatttgaacccctgagatatatttttctaatgaacagaactgcctgattagattctatactcttttgttttttggtggaggagagtggggtatgaagattgttttttacccactttaatcattatgttgaaacacacacacacacacacacacacacacacaaacacagcgtggtctgcttgtacttttaattttaactgcagcaatttgatggtctgaaaataataaaatcttgcagtattctgaaggtatgaacctttcccatttacaccagtctgagaattaaatatggcaattccctgaaagtctttatattttatctcttagtccagttaataccgtcagcaaatgctaataagtactaataagcatttttgaccttagtaatatgatttttattgcttattatcttgttcatttttgcttttggcagcaagaaatggccttttatttcatgaaaaattatcaatggtaactgtgaataaactgttgccgtctttttgttttatgttttacacatatatacatagtcttttattttcttgctggtttttatgtatattctgtgcttcttttatttcagttgtaaagaaagtacattttacatttcaaaaaattttgttaatgttcccaatttaatgaaaaataatatataactcctttatatgcttaaatctatataaattcctagtagctgtaggatgaaaaatgttattctttggttaattgcatgcctccacttacattcattttttttttctcatagaactctatattgccaattgtaaaaatcttgggaacttgcttaagctcacagttagtaagtagtgtgcggccaagattctgaacatagatcttttgacattaaaccctgtatcaattacctgttattgtataacagtatcattaaaattagataattaaaaaaacacacatttattatttgatagtttctttgagtcaggaggccagacacagcatagccaggtactctgcttaaggtttcacaagagtataatcaaggaattgtcagggctaccatttgatctgaaacatgattagggaagcatttgcttccaagctcaatcagattgttatgtattccttatggactcagaacacaacacagtttgtgttctcatgttatacagacacatagacaaatgtatacaacatagaatctcatgttatgtaaccacataatcacatacatgggaaatagaaacatagacttttctttggggtagaagcaagtcacagattttttggaccatccttaatgccccctatcctctttcatgggtggcaagctctaatgtcacagatgacatctatatctatctctgtatctatgacctagggaaattgattctagggtcatgtcggtaattatattatactcttctcccatattttagagtcatttccattgtaatcttttgaacttttgcgaaaaatgttatagggcatgaaattcaaaatagtgaatttatacgtattcaggatttttgagtaactttcccaagaactgaaaacaaaactaaaaagatgtttatgtttttatattttaaaaatgtgtatatccaagagaaaagcaaaatatagggaactagggaaaggagaaccaaactgtcaattagtagaatcaggcttttgttttgaatctgcttttattatctaggttgtcttggttaggtgattttaactcttgggattggaaaatgtggagataacagtcttagattgactttatgttccacctatacatacataaaaagggatgctaagtttcctcctagttctaaaattttgtgattcaatttttacttgtatgtgacttttgaacaaaataagcataaattctacaccaaaatgtacaatgtacgtgcatttacttagtactttattcacaacataatagaataataaatatttagtaagtacctaaatattaaggtatttctttcagtttctaaagaaaaagctaaagatagaagaacaaaactccaattctgaacgatttttcttttttttttagatagagtctcgctctgtcccccaggctggagtgcagtggcacaatctcggctcactgcaagctctgcctcctgggttcacgccattctcctgcctcagcctcccgagtagctggaactacaggcacctgctaccacgaccagctaattttttgtatttttaggagagacagggtttcaccgtgttagccagaaagcgccgggattacaggcatgagccaccacgcccggcccataataaataattttaacaatcttcctttgaaaaagatcttatattcctgtcttggctaaaagctaacatttcttatggccctagaatcaatgagagatggtagaagtgggtcatgaaaagaattgatattagctctggaggaaactgtccaaatatagttagtgtaaggctattaggcagaagaggactagagaaagtgagagggtctatgttcactagccagaaagttcatggaattgagagattaaatgtttttacccttatcatttttcccatctcatgtctcaatgtcttttttccccccagtgccgattttcagtgccttttctttagcttaagaggaccaaaagggttgagagttccaagtatgttgcatctctgcaacacttataattataaaaagatgggctccttcaaagctgccctgatgacattctgtttctccatgtgttcttactgcattttatacctgttagttttacattttccctgtatacattctcaagtatatagagaatatatacttggttgtcatgagaaaccaaatgtaataattactactattgctacagtgattaattgcttcagccacttgatcatccaatactttatacttgcactcatcctatgccaccacaggtgtcatttgagtaattgtgatgccacatctggcaaaaattagccacaagctatgtgaatccccacctccacaaaaggagtttatgcatggatccttaatatgcacagtccaatccaagaatctcattttgaggtttttttttttctcagagacaactcaagcaccaattactataatacttggtgtatcagcaagaaaatgtcaccctcaaatttggataaaccaatgtgtttttagtaaaggaaagcttaagagaggtgtgagtagagtatagggtaactataagaggtaatgtcatacactgacaaaacaaggaatacagaagaaaaatttcgccagaaaaaaacataatctaatgggaaaatgtcatataacatgagccgtatttagaaaagaaggcagccagcttggagagaacctatgcaacacatacctggctattatttgcctcttccccttcatcttctcctttctttgcccatttgtggaagccaactgaatgtcagatggctcaggagccttctgatgtaatccatgcatctctgagcaagtgaagagtggatgtaaagggcaaacagacatatctgcagcttacctcctcaaggcagtatcttctgaattggtcttgtcaagagaatctcaatcaacaatgggatatagattcaggagaaattgagaggaaatttatgagttaaagcttaagtgattggcttaggaaaacaagtgccatatagggtgaggcataataacactgtggtattggacattatttagttgtggtttcctttatgtgtttgtataaaatcaacttttagttatataatttgctctatagtataggtactttgtttcaatctctctctttccactataagaattgcatacacattttaaagctagtttaattttaaaaaaattattaatttggccaggcgtggtggcttacacctgtaatcacaacactttgggaggctgaggcaggtggatctcttgaggccaagagttcaatgtcagcctggtcaccatggtgaaacccaccccatctgtacttaaaatacaaaaaaatttggtggacgtggtggtgggcacctcttatcccagctactcgggaggctgaggcaggaaaatcacttgaacccgggaggactctgttgcagtcaggcgagattgtgccactgcactccagcctggcctgggtgacagagtgaggctgtttcaaaaaaaaaaaaaaaagaaatgtattaatttactagcttctattgtgagtaacgaaagattatacttctgtgtttagatcatattgatagtatttgtaacattacataattctatattttgctcccaaaaaaatttgtggccaggcatgctggctcatgcctgtaatcccaacactttgggaggccaaggtggggggatcacttaaggtcaggagtttgagaccagcctggccaacatagtgaaaccctgtctactgaaaatacaaaaattagctgggtatggtggtgctttcctgtagtcccagataagaggctgaggcagaagaatcgcttgaaccctggaggtggaggttgtagtgagctgagattatgccactgaactctggtctgggtgacagagtgagactcagtatcaaaaaaaaaaaaaaattgcattgctgcaaaatgagaaagctgctcctctagccagagtatggctaagggaagtacatcataacttttaatcattgatgtgtgattaaaattttaaagctttgataacattttaattaatgatttaagatgtttggctaattttcatctcaatttagattcaagcactttgcaagcctgttttaatctctatgcttaaaaacctacatattaataaaatcagccttactacatacaagctgtcaacaaactgttctaaacacagtggaggtatgaagtcaagtacctttctagctaatgtagtcagcctatacagttgttcaatggggcaacacaatcatatctccaattgttacagagattgaaatgattatcatctgaactactgcacttggtagcaaagttttctttctcaagaaggtttttggtaaaatacagatctatcaacaggagataccattacattttttgcatttaccaaatcatttgcagagggatacactcagaatatgatagtttccatgaaaaatagtgaaccataaaaaccgaactaaatggaatatagaacagaagtattggaatgcgaggcaaatgttaagaggaagagatataggaaaatatatcaactcattattcaagctttatttacatcacaaaaagtttccattcacaaatttttcaaataaaactgaaaggtttccatgatattttaaaaatatactctgtattttatcttcacaagaacttggaacaatagtctatccacaattcctgatccaaacaagtgcccaatcttcatctatcttgcctcatattttcagtataaaaagcccattcaatttttagggaaaaagacacaacacaatggcacaattcctaaggttcttattatatacaaccctatagctaataatgcacatttcatttccatttctaggttgaataattttgatgggcagaagtgttctaaagtatgcttttataaacctcatatcacagtaatccattgttgaaacatggcttaatgcatgttttaggatgggtgaaggaaggagagaagggaaaaagaaaagatgaagaaaggaagaaaaaaagaaaaaagaaggtgaaggaaagagagaggaagaaagaaaatgaaaatatgagcatgttatgaagaaaactgaaaatatgtaattattttttcttaattttagcaggtgtagaaactcttaaggctgatgatgagatagctatttttgccataaattacatgaattatattcatttttacattcttataatacagcattagaatatgttgtgttatacgtagactccttagaagatacacataaataaaagaaaaaaattaaaagctgctttcaacttactatcattcatgtccatctctgtgtgcatgtattacacacacacacacatccccacagtaagaacccactaaatattgttaagttctgggaaaatatgaccttaagtgaaatgacgtacaataggtccttgaataacatagtcatttagatataattataatatggaaaaaatggattttgttatgcatcgttttgattaaagtcacagtttccaagaacctattgatgacattgaggagtttatacacacacaaacatacacaaacatgcacacacatacaacacacacacacacaaatgtagttatacacaatatactgactgccttataagaattttttttctatcttgtaataatacatgagtaccacatttttcaatgcatttaatcatgctgtatctgagaatgtgacttaagtcccataatagagtataaatgttcaatgtattattgtagatagataatatgaaactgtgtgtgggagtggagtgagtaataatttaagaaaaggctcttcctgaaccagttcatctatgggagatcagaatatggcaccccaaaataggatggtttggcataaggattattgagctgaaggcaattaagaagcagatgaagaaaagctctctgcctctatttacctaaaaggaagatatacatttacaaagataaaaaatatcccacctcccctctaaaccagggagaacaaatgttatctactgaagagaacattagactgttatgggcctggagatggcaccagaggaatgtacgttaacaagctttacttagactttatctgccttttctttgccttgcctcaagttgctgtctttagaaattcaaaatccttttcctttgtcatgtcacttccctaaaatttactgttctttgttgaacaacgcgttatacagctgaaattcaaactcacctccttgacagctactcattcccttgctgtcttccatgtatatatgaaatacacatgtcaataaacttctctggcgtttctcttgttaatctctcttttggtccatgggtccattccaactaatactttacaagaattgaggaaaaaaatatttttcctcttccaaatagctatttagtattttctggctgtcagagcaagtgtattgacagagtactcacatttcattctctttccaacactcttctttggatacactttaattataatccttaaaaatcagtctctgtgttagaagttgacatgatatatggaggaaaagggccactttttaattctggaagttaatgcaataatataaagtagaaaaatagcatatcttgaaacatatttcatgtcaaacacagacatatccttctaaaatgcagcatcaggaaataagcataataacagagttcaaactatgatttcgaaacagataatttgacaactcaagtatatggatataataagcctttattctgattttttttccaaatagtctgatagtggaaaatgttcaaagaaaatttgaaggaggaggactgtgtactatcttattttccctcattatttttcttatatactttaaagtaattttattctgcaatattgtgtcgatctatgaatttctcaaccactgtttctgaattgcaataaaatcaaaccaagcaagatggccttaatatttccctcatcttgacgaaactttaaacagttttcttcctgaccacatgtcctgacttttatatatatatatatatttttgttatactttaagttctagggtacatgtgcacaacgtgcaggtttgttacgtatgtatacgtgtgccatgctggtgtgctgcacccattaactcatcatttacattaggtatatctcctaatgctatcagtcccccctccctgcaccccacaacagtccccggtgtgtgatgttccccttcctgtgtccatgtgttctcattgttcaattcccacctatgagtgaaaacatgcagtgtttggtattttgtccttgcgatagtttgctgagaatgatggtttccggtttcatccaggtccctacaaaggacatgaactcatcatttcttatggctgcatagtattccatggtgtatatgtgccacgtttcctaatccagtctatcgttgttggatatttaggttagttccaagcctttgctattgtgaatagtgctgctataaacatacatgtgcatgtgtctttttagcagcatgatttatagtcctttgggtatatacccagtaatgggatggctgggtcaaatggtatttctagttctagatccctgaggaatcaccacactgacttccacaatggttgaactagtttacagtcccaccaacagtgtaaaagtgctactatttctccacatcctctccagcacctgttgtttcctgactttttaatgatggccattctaactggtgtgagatggtatctcattgtggttttgatttgcatttctctgatggccagtgatgatgagcatttttccatgtgttttttggctgcataaatgtcttcttttgagaagtgtctgttcatatcctttgcccactttttgatggggttgtttgtttttttcttgtaaatttgtttgagttcattgtagattctggatattagccctttgtcagatgagtaggttgcaaaaattttctcccattctgtaggttgcctgttcactctgatggtggtttcttttgctgtgcagaagctctttagtttaattagatcccatttgtcaattttggcttttgttgccattgcttttggtgtttgagacatgaagtccttgcccatgcctatgtcctgaatgctattgcctaggttttcttctagggtttttatggttttaggtctaacatgtaagtcttcagtccatcttgaattaatttttctgtaaggtgtaaggaagggatccagtttcagctttctacatgtggctagccagttttcccagcaccatttattaaatagggaatcctctccccattgcttgtttttctcagggttgtcgaagaccagatagttgtagataagcagcattatttctgaggactctgttctgttccattggtctatatctctgtgttggtaccagtaccatgctgttttggttactgcagccttgtagtatcatttgaagtcaggtagcacgatgcctccagctttgttcttttgccttaggattgacttggtgatgcgggctcttttttggttccatatgaactttagtttttcccaactctgtgaagaaaggcattggtagcttgacggggatggcattgaatccataaatgaacttgggcagtatggccattttcacgatattgattcttcctacccatgagcatggaatgttcttccatttctttgtatcctcttttatttccttgaggagtggtttgtagttctccttgaagaggtccttcacgtcccttgtaagttggattcctaggtattttattctctttgaagcagttgtgaatgggagttcactcatgatttggctctctgtttgtctgttattggtatataagaatgcttgtgatttttgtacattgattttgtatcctcagactttgctgaagttgcttatcagcttgaggagattttgggctgagacaacggggttttctagatatacaatcgtgtcatctgcaaacagggacaatttgacttcctcttttcctaattgaataccccttatttccttctcctgcctgattgccctggccagaacttccaacactgtgttgaataggagtggtgagagagggcatccctgttttgtgcccgttttcaaagggaatgcttccagtttttgcccattcagtatgatactggctgtggggttgtcatagatagctcttatgattttgagatacgtcccatcaatgcctaattcattgagagtttttagcatgaagggttgttgaattttgtcaaaggccttttctgcatctattgagataatcatgtggtttttgtctttggttctgtttttatgctggattacatttattgatttgtgtatattgaaccagccttgcatgccagggatgaagcccacttaatcatggtggataagctttttgatgtgctgctggactcggtttgcccgtattttattggggatttttgcaccgatgctcatcaagtatattggtctaaaattctcttttttggttgtgtctctgccaggctttggtatcaggatgatgctggcctcacaaaatgagttagggaggattccctctttttctattgattggaatcatttcagaagcaatggtaccagttcctccttgtacctctggtagaatttggctgtgaatccatcttgtcctggactctttttggttggtaagctattgattattgccacaatttcagagcctgttactggtctattcagagattcaacttggaaatttgtagcactaaatgcccacaagagaagcaggaaagatctaaaattaacagcctaacatcacaattaaaagaactacagaagcaagagcaaacacattcaaaagctagcagaaggcaagaaataactaagatcagagcagaactgaaggagatagagacacagaaacccttcaaaaaatcaatgaatccaggagctagttttttgagaagatcaacaaaattgatagaccactagcaagactaataaagaagaaaagagagaagaatcaaatagatgcaataaaaaatgaaaaaggggatatcaccaccgatcccacagaaatacaaactaccatcagagaatactataaccacctctatgcaaataaactagaaaatctagaagaaatggataaattcctcgacacatacaccctcccaagactaaaccaggaagaagatgaatctctgacttttgttttcttagagcatttactttagaaaattttccattgtaaattcttcctatgactctttgagttataattttctcccagccactcattagttttataacccagggatgtctcagaaaccttggagacatccctttgaaatattgttatccagaaagatattttcccagtctcccagtttgtatagataataggagctgaaattccataggcaacaattaaacacaggtggtccaaactcagggaaaaacctccccttcacttcctccagtgcttttccactaaaattttcttgcatttcatttcaaaagaactgagttcaatttctatccactattgcaatagccttgaataaagtcttgcctgtttaactctatctggtataatttttcttcaaaagaacttagtcacgttctattttggcaatgggattcatattggaacttaattttatattataaaatagatcatcacaaacataaaatatgagtatatgtttccaacaacattgtgtgcatcaaaccaggcactaaatggcaaaggtatacataatcataataacaacttttgtggtgatagagttttttctagatgcactagatatgcagatattcttaaaataaagtttcttacagattaaccaaaagatacttctgccagacaaaagttttactcattattacaaggattctagaccttttaaaattcagatattctgtttgaaagtcaatgtacaaattcccctaagttcttaaaaaataggggccagtttcatggtgacctgttcaaagatctattgctgagatagattttagtaaatcaatttggttcactatcctagttggtcacaaataggagtttttgttattacttcaattatcttattcattacttactcaaaataatttttaagttttatcccatacaaaaaatagatggtaaggtttttaaagtaactatatgactattagacttatttccaggtaacttgctttattttggcatgtctttaagaagatttattacataaaaagtaagaaaaattaattttaatgcatttctaaaatttcaaaatcttgctttttaaaaaaattagtcttaatttaaaaagcacaatgaaagaaaataagtcgttaagtgatctatattatcctaattatgttatataaatcaaaatttgtgaaaaaaataggttcacacttctgaatctcaaataaattttatagatcaaaaattaccaccaaaggtgctcagaaacaatgactaaaatttccatctctagcaattttatatacaaaaaaattgtctcaacaatgctagctaataaattagagtttagttacaaaatgaacagtgataaaatctatcacaggcaggaaaattttagaaaaggtcaagacctcttagatgatcttaccttcaattttagaccaatgaaagtttataagtgaaatttaacccttcaaaaatgccccccaacatagtatcttattcttgtgtaacctgaaaaaacaaaaaaaaactgatattagaaaaaaaatccaaatcttctggtagcctagaaataatcaatagccttgtagacaaccatgtatctgggttgcattatgaactaagcataggatagaattaaactagatactgctaaaatgaatggacaatttttagtggtgtgtatacaacgcttaaagttcaagtaacgtaaatggcctacttcaaatatattttctaaactgtagaattttacaccaaacagtatattctgccacagtaaactgtctctggctttcttaaaagtgatttattttatactgcaaattattttgtcatgtctattttgcatatatgtgtgttcccttccgattttctcaacaactctctcttagacggaaagcattttctttttagaaaccattttgaatacatcatcacatatatgtaacagaacatttaaaaagaaactgtttcatccaaaactatgctacctactctcagtgaagagagttgcagacaacttttgtagaacatggaagagaagtgactgaagttcagtgtgtaacattcacatgattaaatatcatataaatataaataatataatgattaaagatgggaggctcaggtagcttggagactgaggatttgggaggaaagcaatattacagagtgttgattgtaagttgtcaacaaaaagtcatcggacttcttgcatttctccataagcttcatgacaagaacatcaggagggtctctctgaaaagaactaaatttacagaagttagagaatttagagaaattagttgatgagtatctgactttcacttgacaactttaaagggtgaaagtctaaatgaagaacttttgcaggagattaaaggcctgcagttaggaagtaactgtattccaactagagatgagtctcaagtgagtgtttcccaccagcaaatgtgggccatgcaagagagtagacaagaaggagacgatctcaagcccagcccaagagaatcaccatgaggaatgaggagacctcagcagtaagatgctgggctgtgcagccacatccgcgggaacagcaagagtaagtaaccacatgacaaattctccagccatcccaggaattgccagaaacagctatccaaatttggaggtctccaaagtatctgcctacgtggttcaatctcaggagttgccaaaatcagacgtagagagtacagcaatgcaccctttcttttctctttacctctaatgctttttccagggtcaaaactggaggagatgaaaatcagcatttagtaagttgaagaaagagagatgaataaggcagagagagaacaaggttgttgacacccagattctaaggcagccaggaaaaatgatgcctacaaaaggatatctgtgcagaaaaaaaattggagtagatttctagccaaacttacaagtcctctgtgtctaatgtatttcagagtaggagataaagtatttgttggattagcgcattagcaaaattatctagagaaaggaatacgtgtgtaatgtccaataaaggccagtgattctccaattgaacataaaatggactaagttgataagcaatgtggggctttttcaacaagtagtttaaaataaaaatcatgaaggtggatgaaatatttctttacctcaaaaaaaataaatggataaagacacttctactatctttgttatttttcactatactagccctaattatttcattactaactttaccatcaattgaaagttataaaatgcatgtttccatcatgatactgtgtcatatatattttaaaagatggttataaaagtcatctatcattattaaattaaattttgagtcaatatatatttgtattgggccatgaatatgcataagaaattaatactctgaataatatgtactctttcagtgccctagaaaagacaataggagcctgctacaatttgttattattgcacagtgacagttaatcaaaaattattaattcattatcaaagtatcgtttccatgacaaagactagaggaaaacaggcagactgtgtccagatttcttccagatatctaccagcaaaatatcaccaaaattaaacaatgaaagatagaggaaaggagaaaaaggtcagagggagaggagagagacagaaagagaatgattatgttttacttaaaaaaacagtaaattgaattccttacttgatttttataggtattgttcatccagtttgtagtaaagggaacatggctgtagacaggaaactgtcattgttgaaaatttggagcttaaaagtatttggtaattttaaatgcaggacatgtatttttgaaaccattcataattaagaaattaaaaagattttagtaacatttgtgaaaaacagaaagaaaatatttaaaagcctttgccctttggagatagtgcctggcttttgtagattcctttcacctctacactatgctaaaacctggctttgtctaaaaaaactttagctatatagatggtcacttcctataaaggcttttctttgttattgtcatagcattatagaatattgatgacttccatatcacctacacagaaaaactgtatatgacttttggaaaaaaatgagagatttagggcaagcaaagttagggtggtgttgtagattcaaaagaaaatgacattttaggttaagtatgttttcaatgttccaattataattgtaaaactataaatgcaggtagaggtaacctcattagaaataactccttattctaagagcaaagagaaaaactgaaatgctaaaatggatactcattcttaatagcatcaagaaacaccaaatacccagcaaatatccaaagattatgttcaatgactctgaacaaggaaacaagcaaaaaattaagtgaaacatgaatgaaagaaattacagaaatctaaacaaaggtataatacacaatatcaatggattgtaaaactcagtagcttaaggatgctaaaatctcctcatgtaatgtcaataaaaattttagcaattttgaagaaattgaagaattaattctaaaatatatacaattcaaattacaaagtgtatgcaagtaatttatgactttactggttaattctatcagtatataaagaagaaaacatcttaaacaagctattacaaaaaatagtaggaaacacatagtattttgttttttgatgctagcataaccctgataacaaacctgacaaaaatacatcaaagaataaaaaagtacacatgaatatcctcattcacacagatacaaaaatacttaatgaatttatttaaaaaataaatccagcagtctataaaatgaataatgcattatgatcaagttggttttaccaagaacgcatgtttgatttaatgtataaaataaataaaatcttattaacagaatgagggaaaaaaacataactcaaacaacatagaaaattcatgtatcaaaagtaaacatgtattcaagataaaaaaaagttaagcaattaggaatagaaagtaacttcctcaatctgataagcaaaatttttatatcaaagaaaacagaactaaactaaactaaagctgacagaaagaagaaggcaagatcatacaatcttttaatttctattcctcatggtagttggaattcctagccactgaaataaagcaaggatgaaagatatatgttaacaacaaagaagaaatatgctcctatttagaaacagcatgatcctttatgtataaaatattaaatacatatactccttttattgctttctttattactttattgaactccacagagatggcattttaaaaaaaattgaaggtttgtggcaaccctgtgttcagcaaatttattagctgttttttccatgtgctcacataatgtctgtgtgtcacagtttggtaattcatgcaatatttcaaactttttcattattatatcttttatgattatctgtaatcagtggtttttactattattactattataattattttggggtgccacaaaccattcccacatcacattgaacttaattcatgaaatgttttgtgtgttctgattgttccacctactggcaaatatcccatctttctccatctcttcagacctctctattccttgagacacaacaatattaaaattagatcaattagtaaccctacaatgacttctaaaggttcaagtgaaagaaagagttgcacatctctgaccttaaatcaaaagctagaaatgattgagcttaatgaggaaggtatgttgtaaccaagataggctgaacgctagccatcttgcacccaacagttagccaagctgtgaattcaaagaaaaacttaagggaaactaaaagtgttattctagtgaatacacaaatgataagaaagccaaaaaaccttattggtgataagtagaaagtttgagtgatctgaatagaagatcaaacaagacacaacattttcttaagccaaaacaaaatccagagcaaggacctagctctcttcaaagctatgaaggctgagagaggtgaggaagccacagaagaaaaattggaatctagcagatgatggttcataaggcttaaggaaataagccatctccataacacaaaagtacaaggtgaagcagcaaccacatgattatgtcaatagatgcaggaaaggctttcaataaaattcaacaccccttcatgtcaaaaactctcaaaaaattaggtattgaaggaacagaccttgaactaataagagccatatgtgaaaaactcacagccaacattatactgaattggcaaaagctggagtatttcccttgaaaaccggcacaggacaaagataccctgtcaccactcctattcaacatagtattggaagttctggccagagcactcaggcaagagaaagaaaaaggggcatccaaataggaagagaggaagtcaaactatccctgccagcgcaagacacgtacctatattcagaaaccctcaaaatctaggcccaaaagatccttaaattgataaacaacttcagcaagtctcaggatacaaaatcaatgtacaaaaataactagcactcctggacaccaataacagtcaaggatccaaatcaggaatgcaatcccattcataattgccacatacacacacaaacacacaaaacctagaaatataattaaacaggaaggtgaaagatctctaccaaagaactacaaaacactgctaaaagaaatcagagatgacacaaacaaatggaaaacagtccatgctagtgaatagaaagtattatttttgttaaaatgcctgtaatatccaaagtaatttatagattcaatgttattcctattaaactaccaatgacattcttcacagaactagaaaaggctattttaatattcatatggaaccccaaacagggcctgaatagccaaggcattcctaagcaaaaaatacagagctggaagcatctggctacccaacttcaaactatactacaggggctacagtaaccaaaacagcatggtactggtataaatacatccacatagaccaatgaaatagaacagagaacccagaattaaggttgcctgcctacaactatctgatctttgacaaagctgacaaaaataatcaatggggaaaggactccctatttagtaaatgtgttgggagaactgatgagccatatgcagaagattaaaactagaccccttccttataccatatacaaaaatgaactcaagatgaattaaagacttaaatgtaaaaccaaaaactataaaaacccatttccctggatgtaggaacaggcaaagattgcatgaccaagatgccaaaagcaattgcaacaaaagtaaaatttgacaaatgggatctaattaagctaaagaggttctgtacaacaaaagaaaccatcaacagagtgaacagacaaacctacagaatgggagaaattttttacaaactatgcatctgacaaaggtctaatatccagcatctaaaaggaatttaaacaaatttttaaggaaaaaagcaaccccattaaaaagtgggcaaaggacatgaacagacacttttaaaaacaaaacatacatatgggcaacaagcgtatgaaaaaaatctcaacatccctaatcattagagaaatccaagtcaaaaccgcaataatataccatctcgcaccagtcaaaatggcaattattacaatttaaaaagtcaaaaaatagcagatgccagtgaggttgcagaaaaaaagcaatgcttatacactactggtgggagtggaaattagtccaaccattgtggaagagagtgtggtgattcctcatggacctaagaacagaaataccatttgaccctgcaatcccattactgagtttatacccaaaggaataaaaattgttctgtcataaagatacatgcatgtatatgttaattgggtcactattcacaatagcaaagacatggaatcaacttaaatgcccatcaatgtttgaatggataaagaaaatgtggtacataaaccacacttggaatgtggtacattccatgtgtaccacatggaatactatgcagccatataaaggatgagataatgtcttttgcaggaacatggatggagctggaggcaattatccttggcaaacgaatgcaggaacagaaaaccaaatactgtatgttcttacttataagtgggatataaatgttgataacatgtggacacatacaggggaacaacacagtgaggcctattgaaggttgggaggagggagaggatcaggaaaaataactagtgggtactaggcttaatgtctgagtgatgaaatagtctgtacaaccaacccccatgacacaagtttacctacataacaaacatggacatatactcctgaacataaaataaaagttaaatttaaaaaaaactaaaacttaacatgcaatatttttagtggtacaaatatatttatgtaactgtaaaaaagagagatgtataagaatatatacaaaatgtaataatggttacttccaaacaatatatgaagtttagaagttgagtttttttttaatctgtaaggttttcttttaaaaaagaaaatgtattagtatattgttttacaatttttttaaaatgtacaagaaagttcttatttctactatattggtctgcttctttgtattttttctggcccaacccgaatcagtcttttcaaagtttatctacattggttagagatggagccttatagaacatttaattaaaggtagtcacccaagcagttattgtatggaaaagatctgtgtactaaatatgaacgtgtgtattgtgtgggggcttatagtattaacaatatgcattttgtctttttgttctttatgtgtattgtttgtgtacctgtgaatttcagtattcgtgagctatgcattaatgtataccacagttaaataaatgaattagttacagaaaaaggaagatcaaaattggaaggccttatctatctgattttaagatgtactaaaaagccacagaaataaataaataaataaataaatggactagaataggtaggaattagtcaactttatcattaaagggccagatactaaatatttcaggccttgtgggccacatatgaggtgtctgtcactttttgcccccttcctcctcctttctcctcttctgcctctttttctacctcttattttgacaatattttaaagatgccaaaattgttattagattgtgagccacataaaaacaggccaggagtcattatttggcaatttttggaacaaaggcaaaaaacagacccacagtagcctttccactaacacttcacaggaatttgatggatcaggaaaaatctctgtagcacatgatgctaggacaactgggtatccatatgaaaaacaaaagttaaccttaacccctacctcataacaaacacaaaattaaataaggagcaaaggtaagagtaaaaggccaaactacaaagtatttagaagaaaacaggggattatcttcatagcctgctgtgaaacaacacagaaagcaacaaccataaaagacaactttaatatattagagtttcttaagaatttgaaacttttgttcttcaaaagataccgctacataaattataaactggaagaaaaatatttgcggaacatgtgtctaacaaacacttgtacgccaaatacacaaaactctatgacaactcaataatataaggacaaattttaaaatggacaaactacttgaaagaaacttcctgaaggaacgtgcatgaataaataatagttatatgaagtgctcaatatccattgataaaaaattcttaaataggcaaaatgaatctacagtgatagaaaacaaattgagttgcttggggaaaaggatggagaaaactgattggaaaaaagtacctgggaactctttagagtaatttaatttttctataccttgttcagagtggtagttacatgtgtgtatatactttccaaaactgtatagttaatgttggtatatttcattgatttcaatgtaggtaaatctaacctcaaatatccataaaaataataatcatatggaaggtcacttccaaattagtggaggaatagttgaaaaaatagtctaatactattattttttaatctggataatggctccatgatagtttgttatggcattcaatttattctgtatatggctgaaattttaaaactcttaagctaaaaagcatttgtcacatgcttttgctgaaatattggttccttgtaacttctcacttaattaaagcagacatctaaaggtgatttatttcccacccagaaaactaagagtacaaggattcatttgtgtccactagggaatcaagtgatccaggagaatgtgcttcactattttttgcttttcctgacccttaaactagcttctaattcctcttgctaaaaaaggaaaagggatagctgggtctggtggctcccacctataatcccagcactttgggaggataaggcagttggatcacttgagggcaggagttccagaccagcctggccaatatggcaatacctcgtctctactaaaaatatacaaattagttggggtggtggctcaatctcataatctcagctactagggtggctgaagcatgagaatcacttgaacctgggaagtggaggttgcagtgagtggagatcatgtccctgcactccagcctgagtgacagagtgagactctgttaaaaaaaaaaagaaaaaaagggaaaggaagcaaagaaaatagaaaagttacttcctcgaaggtaaccctaggagttttcttcagtgtatttaggaacataattagcttttttaaaaagaaatattgatgcatgcttgctttctctctgtgtagaactacattacgcagaagtgttaatgatgttttcaaggtgacagtgttatctcacaacatataatttcctctcttaaaagtactatcattgaaatgggctcacataatatgtaaatatatggtgataaatttatagtctcattacaaactataagaattattccgtacatgtaaaatatgaactactataattaggtgtaaaaccaaggttgtaaatttaattttaataatttgcctataatatttatcagtccaaagtgatttgaaaaggaaatctctttattatgagttttacaatattcttacattacttctgtcattatatatgagacaaatcatgacacatcagcatttgacaggtgtagcagatgccgtggatcaacttacacaaaacttattccaactacctcctttgcacatgtttctgaactgcagaactgagaagctaaaactatacttaaaagattcaattgcagctatgattctatgtatggggttactctgacaagattatttttatataagacattgttcagaatgtactatgaaggagacaggtgttacacttttggcaggtacaaatcatggcagaagtgctgtggttctagtgttagctgtggttctgtagttggcaatgccagcatcagctttctggaaccaggcatctggatcatggaaaaggcagctttttctaggtggtattgtttggctatgtccccacccaaatctcatctcgaattgtagctccgataattccttcatgttgtgagagggacccagtgggagataattgaatcacaggggcggtttctcctatggtgttctcatggcagtgaataagtctcatgagctctgatggttttataaagggaaaaccctttcacgtggctctcactctcttgtctgccaccatgggagacatgtctttcacctttcaccatgattgtgaggcctctccagccacatggacctgtgagtccattaaacctctttcttttgcaaatcgtccagtctcaggtatgtctttgtcagcagtgcggaagtggccaattatactatagcagatcagttatgttgtggttttgcacctcattcctggcaggtcaaaacagaatctatctcttccatcctttcaataatatgtgagctatttatgccacttaataattcccttcagcttgaggaagctagagtatattgctttttgtaactagtatccctaactgatattgcaaacttcacataaaaacatcctgttgaagatgaagaactagaagtagaagattctttttccccagggacatatgatatttaaaaaaagctacaggtagctggtctttactgtgtacattatcaatctcttacccaaaatactatagtggtattcactgctataactatttacagtatatacagctgttttcttacggtcttagcaaaaccatcttctcctctgttgtgacttgcatgtgcccccccaaatttcatgtgttggaaactaaattcccaaattcatatgttgaagatatttggaggtggggcctttggaggaagtaatcaagattagataaggtcattaaagttgttctcccatgttgagactggcagctttagaagaaaagaaagagagatgtgagctgacttgcatactcttgccctctcactatgcgatgccctctcaccatgcaatgccctctcaccatgtatgatacagtaataaagcctcaccagatgccaatgccatactcttggacttcctagcctccagaaccataagaaataatttttttctttgtaaattacccagtccatagtattctgttacagcaacagaaaagcaattaagataccgtctcaaacctggttttgtctataccttgtgagaacctcacaactgtaattcttctgtataacacatcaattaaaatagagtctagacaaaatgtcagtattaaagaaatcaggaaaacagggccgggttgataataaggccacaatatttgctgcctctgagaatttggaaaggaatgaatttgaagaagaagctttctgcttgcatatctagttcttattcatatgcacacaagcctaaggggaaaaattcaggctcatcatcctttcaattgcttagaagcatgtagcagctctccaacttacctttcttaacaaaacagctcaggctgcagaatgatcatagttttgaattcagccatggcttttaatttatttattttaggctttgctagattataaagctctggaagctggggttcaaaggcaatcatgtttaaagaaaatacttagttgggaatattctaagagcaactgatgggtttaataattctcgtagatactatataaacttttgaatagctagcatttaggtaaataatcacaaagaaacactcttcttttggaataaattacatagggtcctgttgttatctatttgcaaataatctcattcacgttttgatgaaactcacaatgtacaggttttctgagtaaaatggaaacaggaggcctcctgaagatacaataagatggttatatttattttcaaacctttaaggaaagctcctgcaagttaggctaagatgtaaattttagtgaggattctattagaagttccaaggcaacagtcactttcaaaaatgatagacccactgtgagcaaaagagagaagataatgactctgaccgagctggcattgttgaataagggccccgatttgctgctcaacagttgactctgcaggtttcaattataggaatagctggaatatactgctctacaatattactggcagaatttgcaaagaattgatagagtttaagtgtgtgtctgtgtgtgtgtgtttgtgggtgtgcatgtgcagcacacagacatgcattatgaagagggagttactcaagtaaaaagcacctgccattaccataacaggtatgatctaggccgacccacgatgcttgggtgggtggtgggacattcataatagaacatttaactacaggcatgcttatattccagttatgtagagggcccagtacacctctaaattgttgcactagagtctttattttggctggatttaaaggccagttcccaaaatttgtgtagattctttgtagttacataattaaaaattgaaagaattttaaaaatgacaactgtagtctcactgatttttttaaataaaattaaaagaccagtataactgtaagccctagttcagaaaaataaaaaatgataaaggggatatcaccaccgatcccacagaaatacaaactaccatcagagaatactacaaacacctctacgcaaataaactagaaaatctagaagaaagggataaattcctcgacacatacactctcccaaggctaaaccaggaagaagttgaatctctgaatagaccaataacaggatctgaaattgtgacaataatcaatagcttaccaaccaaaaagagtccaggaccagatggattcacagctgaattctaccagaggtacaaggaggaactggtaccattccttctgaaactattccaatcaatagaaaaagaaggaatcctccctaactcattttatgaggccagcatcatgctgataccaaagctgggcagagacacaaccaaaaaaaagaattttagaccaatatccttgatgaacattgatgcaaaaatcctcaataaaatactggcaaaccgaatccagcagcacatcaaaaagcttatccaccatgatcaagtgggcttcatccctgggatgcaaggctggttcaatatacacaaatcaataaatgtaatccagcatataaacagaaccaaagacaaaaatcacatgattatctcaatagatgcagaaaaggactttgacaaaattcaacaactccttcgtgctaaaaactctcaataaattaggtattgatgggacgtacctcaaactaataagagctatctatgacaaacccacagccaatatcatactgaatgggcaaaaactggaagcattccctttgaaaacgggcacaagacagggatgccctctctcaccactcctattcaacacagtgttggaagttctggccagggcaattaggcaggagaaggaaaaaagggtattcaattaggaaaagaggaagtcaaattgtccctgtttgcagatgacatgattgtatatctagaaaaccccattgtctcagccaaaaatctccttaagctgataagcaacttcagcaaagtctcaggatacaaaatcaatgtacaaaaatcacaagcattcttatacaccaataacagacaaacagagagccaaatcatgagtgaactcccattcacaactgcttcaaagagaatgaaatacctaggaatccaaattacaagggacgtgaaggacctcttcaaggagaactacaaaccactcctcaaggaaataaaagaggatacaaagaaatggaagaacattccatgctcatgggtaggaagaatcaatatcgtgaaaatggccatactgcccaaggtaattcatagattcaatgccatccccatcaagctaccaatgactttcttcacagaattggaaaaaacgactttaaagttgatatggaaccaaaaaagagcctgcattgccaagtcaatcctaagccaaaagaacaaagttggaggcatcatgctacttgacttcaaactatactacaaggctacagtaaccaaaatagcatggtactggtaccaaaacagagatatagatcaatgaaacagaacagagccctcagaaataacgccgcatatctacaactatctgatctttgacaaacctgagaaaaacaagcagtggggaaaagattccctatttaataaatggtgctgggaaaactggctagccatatgaagaaagctgaaactggatcccttccttacaccttatagaaaaattaattcaagatggattaaagacttaaacgttagatctaaaaccataaaaaccctagaagaaaacctaggcattaccattcaggacataggcatgggcaaggacttcacatgtaaaacaccaaaagcaatggcaacaaaagccaaaattgacaaatgggatctcattaaactaaagagcttctgcacagcaaaagaaactaccatcagagtgaacaggcaacctacaaaatgggagaaaatttttgcaacctacgcatctggcaaagggctaatatccagaatctacaatgaactcaaatttacaagaaaaaaacaaccccatcaaaaagtgggtgaaggacatgaacagacacttctcaaaagaagacatttatagccaaaaaacacgtggaaaaatgctcatcatcactggccatcagagaaatgcaaatcaaaaccacaatgagataccatctcacaccagttagaatggcaatcattaaaaagtcaggaaacaacacgtgctggagaggatgtggagaaataggaacacttttacactgttgttgggacagtaaactagttcaaccattgtggaagtcagtgtggcaattcctcagagatctagaactggaaataccatttgacccagccatcccattactgggtatatacccaaaggactatagatcatgctgctataaagacacatgcacacgtatgtttatagcagcactattcacaatagcaaagacttggaaccaacccaaatggccaacaatgatagactggattaagaaaatgtggcaaatatacaccatggaatactatgcagccataaaaaatgatgagttcatgtcctttgtagggacatggctgaaattggaaatcatcattctcagtaaactatcgcaagaacaaaaaaccaaacaccgcatattctcactcataggtgggaattgaacaatgagaacacatggacacaggaaggggaacatcaaactctggggactgttgtggggtggagggaggggggagggacagcattaggaggtatagctaatgctaaatgacgagttaatggatgcagcacaccagcatggcacatgtatacatatgtaactaacttgaacattgcgcacatgtaccctataacttaaagtataataataaaaaaagaaaaaaaaacaggttgaaaacactttttgtagaaactacaaagcaacatttcaatgttcattgacacctataaaaaaaccctataacacggcaataaaaactagaaacaagctatttgtgaaaatgctttgccatgtgttcattctaggttggaaacactcttttgtaaaagtctatgaagaaacatttcaaagcccatttaagcctatactgaaaaactaaataccctgcgataaaaactggaaactagctctctgtgaaaattctttgcaatgtgtgaattcatctcacagagttaaacctctgttttgatttagcattttggaaatactcttttctagaatctacaaagtgacatttcatagcccattgagatctaaagtgaaaaacctaatatcccagataaaaactacaaacaagctatttgggaaaaccctatatgatgtgtggattcatctcacagagttaaacctttgttttgattcaacaggttggaaacacatcttttctagtatatacgaagggacatttcaaagccaattgaggcctatatgaaaaaacaaatatcctgctataaaaagtagaaacaagtatctgtgaggatgcttgatgatgtgtgtagtcatctcacatagttaaacctttgtttttattcagaaggttggaaacactctttttggagaatctacaaagaaacattctgaatcccattgaggcctatagtgaaaacttgaatatcctgtgataaaaacgagaagcaagctatctgtgaaaatgccttctgatgtgtggattcatctctcagagataagccttcattttgattcagtagtttggaaatacttttattgtagaatataggaagggacatttaaatgcaattgaggcctgtgctgaaaaactgaatatcctgtgataaaaactagaagcaacacatctgtgaaaatgctttgtgatgtgttcattcatgtcacagagttaaacttttgttttgattaaacagtttggacacattccttttctaaaatctacgaagagacatttcaaagcccattgaggcctacaatgaaaaaccgaatctccaacgataaaaactagaaatcagctatctgtaaagatgatttgtgatgtgtggattcatctcacagagataaacatttgttttgattcaacaggttgaaaacagcttattgtggcctgtggtgaaaaaatgaatattccgtgataaagatgagaaacaagtatctgtgaaaatgatttgtgatgtgtgcagtcatctcatatagttaaaccttagttttgatttaacaggttggaatcactcgtattgtagaatcaacgaagggacattttgaagcccatttatttttatagagaaaaaccaaatatcctgtgataaaaactagaaacaggctacctgtgaaaatgctttgtggtgtgtggattcgtttcacagaattaaacctttgttttacttcagcagtttgaaaatgctctttttgtagaatctacgaagagacatttcaaagcccattgaagcttatagggaaaactgaatatcccatgataaaaactagaaacaagctatctgtgaaaatgctttgcaatgttttcattcatttcacaaagttaaacctttgctttgattcagcagattggaaacactctttctgtacaggcagtgaagggacattttggagcccattgaggcctacagtggaaaactgaatatcccacaataaaaactagaaacaagctatctgtgacaaggttttttgatctgtagatttatctcacagcattaaactttgttttgattcagcaggttggtagcactttttttatagaatctacaaagggatattttggaaccaattgaggcctgtaatgaaaaaccaaatgtcctgcaataaaaactagacaaaagctatctttgaaaatgctttgcaatgtgtggattcttctcacagagttaaacctttgttttgaatcagcaggttgcaaaagctctatttatagcacctaagaaggaacattttggagcccattgaagcctatagtgacaaaccaaatatccagtgattaaaactagtagcaagatatctgcaaaagtgctttgcaatgtgtggattaatctcatagagttaaatctttgttttgtatcagcaggttggccacactctttttgtacaattcataaagtgacatttcagagttcactaagacctatagcaaaaaaacaaataattcaaaataaaaactagaaacaagctatatttcaaaatgcttggtgatgtgtggatttatatcacagagttaaacttttgtgttcattcagcaagttggaaacactctttttgtgaattctacatagggacgttttgatgtcagttgaggcctacagtgaaaaacctaatatcctgtgaacaaaacaagaaactgtctgtgaaaatactttgtgatgtatggattcatctagcatagttaaacctttgttttgattcagcaggttgtaaacacttttttggtagaatttacaaagggacatttcagagcccatagaggcctacattgaaaaacataatatttcatgttaaaaactaaaaacaaggtatctgtgaagatgctttatgatgtgtggattcagctcacagagataaacctttgttttgattcagcagattggcaagactctttttgtagaatctacgaagggacattttgaagcccattgagccctatagtgaaaaaaagtatatcccacggtaaaaactagaaacaagctatctgtgaaaatgctttgtgatatgtgcattcatttcacataattaaaccttactttttaatcaactagttggaaacactcttattgtagaatctaggaaaggacatttcaaagcccattcaggcctacagagaaaaaccaaatatcctgtgataaaaactataaacaaactatctgtgaaaatgctttgggatatgtggactctttttgtagaatctacgagggcacatttcaaagccaattgaggcctacagtgtaaaacctcatatccagagacaaaaactagaaacaagctatctatgaaaatgcttttcaatgtgttaattcatcccacagagttaaacatttcaaaaaaaaaaatcaggttggaaacagtctttttgtagaatctttgaagagatgtttcagagtgcattgtggcctactgtttaaactagaatatccaacaatggaaacgagaaacaactaccttgattcagcatgatggaaacactctttttaaagaatttactaaaaggcatttcggagcccatggatgagtatattgaaaaactgactatcccacaatacaaaccagcaaaaatttattagtgaaaatgcgttgcttgtgtggattcatctcacagtgttaaacctttattttcattaagtaggttgggaatactcttttgtagaatatacaaaaaagacattttggtgaacattgaggcctaaagtaaaaaaccgaatatttcgtgataacagctaaaaactatctatctgtaaaaatgctttgcgatgtgtgtattcatctcacagagttaaaccactgttttgatataacaggttgaaaacacttttttgtagaatctacgaaggtacatttcagagcctattaaggtatatactgaaaaacctaatatcctgggataaaaaccaaaaacaagctatctgtgtaaatgatttgtgatttgtggattcatcttactgtgttaaacctttttttttttattcagttaaactttttttttgttccccacaagttggagtcctcccacctgggcaccacgccatgttgtggacagcttgtgcaaggaagggaatggggggatggagttggtagcactttctgtgtcatctctctgcaccttttttgcaggttaagttgtgggaccctatccacaccccaccagattgtatcctcacccctatctaaccttattgctgctcacactcttcatcctacaatgaaacttcaggatgatggaggagtgcctggctcatgacttcaagcacagttcagctgaaaaccgaatttgaggtggattgaaggggcccagcggacaggactgctagggactggaagtgggttggccacagaacaatgaggccctgggaggtgtctgttcttggatgtggtgtgcttctgttctttctagaagagtggttcttttgccgggggaggtgatttagaccactgcggacctcagccagccctcaaatcaccagggattgaggaaccacggaaaaaaaaaaaaaaaggacacgcagcccagtaacccaagcagagccacacaggcacaccagaaggtggggttactcaaaataaaaagagttccagtgcatgagccacatttcttacagcaggcgccacttacacacccacagacacacacacacacacacagccacacacaggcagacatccatcacttgcaacactcccacagaaactcacagcctggcagcttctgaggctgagcagttctgcttcaccaggaagtccatccagcaagagagcattcccagggaacacagccaagctgtacctagaaatcatagtgggagaactttcaagaagactcactgcacaccaccaaggcaagcctgacgcatcctgcagatctttttggacccttagggattttgcggtgtatttctggggctccacttgagatttcctcaggctgactcaccgctgccaactgctaggattgtgggattatcccatggatcccccagagaagatggcagagtccagtgccgacgcacgttcatagaggtcttttccactaagccacagggacttgttaccaggcaatggtggcgttcactgtgacctgagccttgtctcaccgctcacaccgggtgccctgagactggtgcgtgtgcatttttgaggcagcctcggaagctggtatgtcaaggcagtcagtctacctaagcagagaaaaatggtacaggcagagccagcctggtcttgggaaaaagtctgctgggacaaccactgccgggatcctaaaactctcaataatatggcctcctaggatcatctcagtggttgcgttgcgctggagggggaggagtttcaataatgtcagctgggcgcaggaaactgctcttctgactccattcccgaaagaggctgtatgcaggaattgggtcacatgggggtgggaatacaacctggtgagttgttgaggggtgtccgggtgatggaatcatacctgagagtccagaggcgggtgtcagtggaagatggctgggccactgagctccctgccttccttcatcctgggcctctcagggtttcctgcttctcagcacggctctctgggaaagggaggatccatgacaaaggcaagtccaaggtggagcagaggtctcagactaggaactggcctctcatgggtgcagatgacgttgagtgtctcagaggccatctgaggtgattgcaagcctgaaaattgtgtccagaagtgctgtcgaggggcactgtggactcctccatgaaagcagaggaaaatcaaggctcgattgggagaacaagagggtctgtgctggagtccaagctgctttgaagaattcctgccagaagacccaacagcctcctgcaaagtgcagacaaccccagcccccacaacaagaccactacctacaacctggagtgcagccagcctacccgaagtttcttttgctccttggaacacctggcagccaaaagatccatggcaagaggcagtcccacccaacaacagcccaataaaagacccttttcacaatgagaaaggacatgcagatgaaatgaaacagagcctagattaccaggcaaaagccagacaaggctgcaagcttctcaagctacataaaacatgcagccctctgataaaactggaagaacaagagttttcttgtttgtgaatattgcaggaatttatgcttccaaaagtatcacagctgcccagtcattaaaacttgacagtatttagaaggaaacactcatgcaattgatccccatgagagtcgtcatccctgaactgggaaatgtttactgtggaagacttagagcctaacccaggaaacctttggcccacgagaaacttgtaagtcagaaaaacagtaggccagtgcggaggccacctcctacccagcatcaatccatcccactcccatgtggctccaggaataaaagcccaaatcaggagctggctagagtggccccactttgcactccaactgttccctacatgttgtagtcctccaacctgggcattgggccatggtgtggactgcttgtgcaatgaagggaatgtgtggatggagttggaagcacctattgtgtcatcgggtctgcaccttttttgcaggtgaaggtgcgggaccaaaaccacaagttgccagattttatcctcacccctgtctgaccttattgctgctcacactctccatcccagaatgaaatatcaagacaatggaagggtgcccaccttacgaagtggagcacctgctccactaggaaccgaatttgaggtggatttaaggggccctgctgacaggactgcttgggtcttgcccttggttggctgcaggaaaatgaggcgctgggatttgtttgttcttcggtgtgatgtgctcctcttctttctagaagagtggaacctttgcaggtggaggtgatttggaccccgacaggtctcagccagccccccaattcactacggattcaggaaccatggaaacaccaatgacagggagccccacagctcaagcagagccacacagaaaggcacaccagaagttggggcgactggaaaaaaaaagtgctgcagtgcgttagccacaggcctttcaggacagtccacttacatgcacacacacacagccacacacacacacagacatccaacactcccaacgctcatggaaacacagtctggcagcttctgaggctgcacggttctgcccgaagccccttctgggacagagaaggcctggggaagacaggcgggctgtacctagaaatcacagtggggaggcaagtttcaaaaagactcacccctacaccgtaaggtaggcctgaccctcctgcagagccctttggatctttaggaatttcacagtttattcctggggctccccttgatgtttcttcaggctggctgacccctgccctctcgtaggattgtgggactatcccgtggatcccccagagaaggcaagctacagtccaacgctgacgcaggtccatagaggtctccttctacttcaagccacagggacttgtcaccaggcagcggtggcattcactgtgccgtcagccgctggtcaccgctggcacctagtgttctgagactggcgcatgcgcattcgcgacacacacctggctgtcaggacagtcagcctgcctaagcagaggaaaatggtacaggcagagcaggcctggtctcaggaaaaaggctgccagaaacgattcattgcgggaccctataagtctcaaccatagtgcctccttgggccgtctccatggtcaggtcctgctggagaaggaggcattttgagactgtcaggtgggcactggaaactgctcttctgactccattcctgaaagaggctgtgcaagaatcaagaatcgggtcccatgggaatgggtatacagtctggtgagttgctgaagggtctctgggtgatggaaagatacctgcaatcccagaggctggtgtcagcagaagattgccaggcccttgagcttactgactcccttcacactgggcctcgcaggggctcctgcttctcagcatgactctctgggaaaggcaggaaccaagataaaggcaagtccaaggtggagcagaggtctcacacctagaactggcctctcacgggtgcaaatgaggctgagagagtgtctcagaagccatctggggccattgcaagcctgaaaagggtgtccaggagtgctgttgaggggctctgtggaaccccttgaaagcaaagaaaaatcaagtctcgcctgggagaacaagcggagttgtgctgagttcaccatgttcaagtattcctgctggaggtccaaacagcctcctacaaagttcaaacaaccccagtccccacaacgagaccactacccacaacctggagtgcagccagcttacacaaactttcttttgctccctgaaatacctggcagccaaaagatctgtggcgagaggcagtcccacccagcaacagcccaatgaaagaccctttccacaataagaaaggacgtgcagatgaaatgaaacagagcctagattaccaggcaaaagccagacacggctgcctgcttgtcatcctacaggaatcatgcagccctccaatagaaggagaacaggagttttctttttggcgaatataatggaaatctacgcttccaaaaatatcacagctgcccagtcattaaaacgtgacagtgtttagaaggaagcactcttgcaatggattcccatgagggtcatcctccacgaactgggaaacatttactgtggaagactttgagcctaactgaggaaaccccaggcccatgaggaagttggaagtcaggaaaacagtaggccactgcggaggccacaacccacccagcatcaatccgtcccacattcatgtggctctggaaatgaaagctgaaattgggagctggccagaatggccccagtttgcgctccaactcttccctacaccttggagtactccctcctgagcaccaggccatggtgtgaactgcttgtgcaaaagaggcaatgcaaggatggagttggaagcaccttccatgtcatctgtcggcacgttttttgcaggtgaaggtgcgggaccccatccacacctaaccagattgtatcctcacccctatctacctgattgctgctcacattcttcatcccagaatgaaatcccaagacgatggagaattgtgtacctcacgacgtgaatcaccttctccactgggaaccaaatttgaggtagattcaaggggcccagcggacaggactgctagagtctggccctgtgttggccacaggaaaatgaggctctgggaggtgtctgttgttgggtgtggtgtgctcctcttctttctagaaaagtggcttctttgcagggggaggtgatttggaccctgtcgggtctcagcaagcccccaaattcaccgcggattcaggaaccacggtaaaacaaatacatggagccccgctgccacagcagagctacatggacaggtgcactagaaggcagggtgactcggaaaaaaaaaaaggtgttccagtgcgtgagcccctttcctttcagtagacgccacttacaggcacacacagacacacacacacgcacagcaacagacacacgcagacatccaacacaacactcccacagaaacacacagcccggaaaattccgaggctgcgcagttctgcaggaagcccctcctgggagagagcagccccaaggaacacaggcgggctttacctagaaatcactgaggggcaagtttcaaaaagattcacccccaccctctctagacatgcctgaaacatcctgcagatctttttgtatccttaggaatttcatggtttattcctgggctctgcttgacgtttcttcaggctggctcgccggtaccatctcctaggatcctggcgctatttcatggatccccagagaagacaggcgagagtacatcgctgacgacgtccacagagtcctccttcccctccatgcctcatggacttgtcgccaggcaacggtgactttcactgtgaggagagccatggctcacggctcgcgcctggtgccctgagcctgacgcatgtgcatttgtgaggcatgcctgggcaccgggctgtcagggctgtcagcctgcctaagcagaggaaaatgatacagggagagcaggcctgtctcgggaaaaggctgcctgcgacaatcactgcgggaccctaaaagtctcaactatagggcctcctccgccgtctccatggtcaggtcctactggagcagaaggcattcggagactgtgagatgggtgctgaaaactgctcttctgactccatccccgaaagaagctctgtgcagcaatcgggtcccatgggaaggggaatactgtattgtagactgttgagcagtctccaggtgctggagtcatatctgaaaccccagagtcggttgtcagcaaaagatgtccatgcccttgagctcactgtctaactttgtcctgggccttgcaggggctcctgcttctcagcacggctctctgggaaaggcaggaaccaccaaaaaggcaagtccaaggtggagcagaggtctcacacctcaaactggcatcccacgagggcagatgaggttgacagagtgtctcagaggccatctggggtgattgcaagcctgaaaagggtgtccaggagtactgttgaaaggcactgtggaccccccatgaatgcaaagaaaactcaaggctcgcctgggagaatgggagtgcctgtgttggagtccaagccatgttcaaggattcctgccagagaacccaagagattcttgcaaagtgtaaacaatcccagccccccaaaacaagaccactacccacaacatggagtgtagccagcctatccgaaattccatttgctaccagaaatctctggcagcgaaaggatctgtggcaagaggcagtcccattcattaacagcccaatgaaaggctcactgcacgaaaggaaaggacgtgcagattaaatgaaacagagcctagattaccaggcaaaacccagataaggctgcctgcttctcattttataaaaatcatgcagccctccaatagaagtggggagcaagagttttcttaatagtggatatggtgaaaatgttttgtgatatgtggatttatttcacagagttaagccttaattttgatttagaaggttggatacactctttttgtacaatctataaggagacatttcaaaatccattgaggcctagagtgaaaaaccaaatatcctgcgataaaaactaaaaagaagctatgtctgaaaatgtttttcaatgtgtgatttcatctcacagagttaaagcttttttgtgattcatcaggttggaaacactctttttctagaatctatgaggggacatttcagagaaaattgaggcctaacgtgaaaaacagattatcctgtgatagaaactagaaacactattagtctggctttatctcatgaaattaaatctttattttgactcagcagttagggaacgtttttttgtagactctatgaaggaacattttggagcccgttgatgcctatagagaaaaacaatatcccacagtaaaaacttgatgcaagctatctgtcaaaaggctttgcaatgtgtggatttatctcacagagttaaacctttgttgtgattcatcaggttggaaacacattttttgtagaatctaagtagggatatttcaaagcacattgaagcctgtagtaaaaaaaaggaatatctcgcgataaaagctacaaacaacctatttgtgtaactgctttgtgatatgtgaaataatgtcatactgttacacttttgttttaaattagcagtttggaaacactcttttgtagaatctacaaagggacatattgaagcccatggaggcctgtattaaaaaaccgaatatgttgcagtaaaaactagaagcaagctatctagctatctgtgaaaatgctttgtgatgtgtggactcatctcacagatttaaacctttcttttgattcagcagattagaaacatttattttgtagaatctacgaataaacatttcagagcccattgaggcctatagtgaaaaaacaaatatcctgtggaaaaactagaaacttgctatctgtgagtatgctttgtgatgtgtagattcatcttacaaagttaaacctttcatttgatttaacagactggaaacactcttttcatagaatctacaaagaaaaattttagagcccattaaggcttatagtaaaaaaaaatattcttgcgatagtttactgagaatgatgatttccaatttcatccatgtccctacaaaggacatgaactcatcattttttatggctgcatagtattccatggtgtatatgtgccacattttcttaatccagtctatcattgttggacatttgggttggttccaagtctttgctattgtgaataatgccacaataaacatacgtgtgcatgtgtctttatagcagcatgatttatagtcatttgggtatatacccagtaatgggatggctgggtcaaatggtatttctagttctagatccctgaggaatcgccacactgacttccacaatggatgaactagtttacagtcccaccaacagtgtaaaagtgttcctatttctccacatcctctccagcacctgttgtttcccgactttttaatgatggccattctaactggtgtgagatggtatctcattgtggttttgatttgcatttctctgatggccagtgatgatgagcattttttcatgtgttttttggctgcataaatgtcttcttttgagaagtgtctgttcatgtccttcgcccactttttgatggggttgtttgtttttttcttgtaaatttgtttgagttcattgtagattctggatattagccctttgtcagatgagtaggttgcgaaaattttctcccattttgtaggttgcctgttcactctgatggtagtttcttttgctgtgcagaagctctttagtttaattagatcccatttgtcaattttgtcttttgttgccattgcttttggtgttttggacatgaagtccttgcccatgcctatgtcctgaatggtcatgcctaggttttcttctagggtttttatggttttaggtctaacgtttaaatctttaatccatcttgaattgatttttgtataaggtgtaaggaagggatccagtttcagcttcctacatatggctagccagttttcccagcaccatttattaaatagggaatcctttccccattgcttgtttttctcaggtttgtcaaagatcagatagttgtaggtatgcagcattatttctgagggctctgttctgttccattgatctatatctctgttttggtaccagtaccatgctgttttggttactgtagccttgtagtatagtttgaagtcaggtagtgtgatgcctccagctttgttcttttggcttaggattgacttggtgatgcgggctcttttttggttccatatgaacttgaaagtagttttttccaattctgtgaagaaagtcattggtagcttgatggggatggcattgaatctgtaaattaccttgggcagtatggccattttcatgatattgattcttcctacccatgagcatggaatgttcttccatttgtttgtatcctcttttatttccttgagcagtggtttgtagttctccttgaagaggtccttcacatcccttgtaagttggattcctaggtattttattctctttgaagcaattgtgaatgggagttcactcatgatttggctctctgtttgtctgttgttggtgtataagaatgcttgtgatttttgtacattgattttgtatcctgagactttgctgaagttgcttatcagcttaaggagattttgggctgagacaatggggttttctagatatagaatcatgtcatctgcaaacagggacaatttgacttcctcttttcctaattggataccctttatttccttctcttgcctaattgccctggccagaacttccaacactatgttgaataggagtggtgagagagggcatccctgtcttgtgcccgttttcaaagggaatgcttccagtttttgcccattcagtatgatattggctgtgggtttgtcatagatagctcttattattttgaaatacgtcccatcaatacctaatttcttagtaaaaaaaaataaatattccgagatataaactagaaacaagctatcagtgaaaatactttgcaatgtgtgggttcatctcacaggttaaacttttttttttttttttagcaggttggaaaccctctttttgtagaatctacaaagggacatttcggagcccattgagttgtatagtgaaaaactgaatatccttcaatagaaactagaaacaagctaacagtgaaaatgctttgtgatgtgtggattcacatcatagagttaaacctatgttttgattaaacaggttgaaaacacttatattgtagattctaagtagggacatttcgaaggccatttaggacaatagtgaaaaatcaattatcctgtgataaaaactagaaaaaaactatttgtggaaatgctttgtgatgtgtggattcgtctcacagagtgaaacctttattttgattcagcaggttggaaacatgtttttttgtagaatctaagaaaagatattctgaagcccactgaggcctatagtgaaaactcaaatatcccacaataaaaactacaaacaagctttctgtgaaaatgctttgtgatgtgtggattcatctcacagatttaaaccttttttttaattcagcagttgaaaacactctttttgtagaatctgtgaagggacatttcagggccaatggagaaaggtacggaaaaagcgaatctacttttatgaaaagcagaaataagctatctgtgaaaatgctttgggttgggtggatcatctcacaaagtgaaaccttgttttaattcagcaggctgaaaacactctttttatagattctacaaaaggacgttacggatctcattgaggcctacagtgaaaagttgaatatcatgtgatgaaaactagaaacaagctatttgtgaaaaggtcttgtgatgtgtagaattgtctcacagatttaaagctttgtttgtattcagcaggttggaaacattctttttgtagaacatacgaagagacgtttagaagcccatggatgagtatattgaaacacaaaatatcctgccataaaaagtacaaacaagctatctgtgaaaatgctttgcattctgtggattgatctcacagagttaaacatttgtttccattcagcaggttggaaacacttgttttgtagaatctactaagagccatttaaaccccattgaagactacaatgaaaggccgaatatcccatgatgaaaacaagaaacaagctatctgtgaaaatgcgttgggatatgtgcattcatttcatagagttaaacctttgctttaattcagcaggttggaaaaactctttgtagaatctacgaagaaacatttcaaagctcattgaagtctatagtgaaaaccaaaatatgtagagatagaaactagaaacaaactatctgtgaaaatgctttgggacgtctggattcatataacagagttaaaccttcgttttgattaagcaggttggaaacagtcagtttatagaatctatgagaagacattttggtgcccattgaggcctatagtgaaaaactgaatatcctgtgataaaaatgagaaataagctatctgtgaaaatgtttcgtgatgtgtggattcatctcactgagttaaacctttgttttgattcagcacattaaaaaccatcttttttttacaatctatgagggggcatatgggagcctattgaggcctatagtgaaaaaccaaatatcctgtgataaaaactacaaacaagctatctgtgaaaatacttcacaacgtgtggatacatctcacagatttaaacctttatttagattcagcaggttggaaacactttttttgtagaatctattaaggcacatttcagagtccatgaaagccattagtaaaaacaatatcccatgacaaaaattagaataaagctatctgtgaaaatgctttgcaatgtgtcgattcatctcacagagttaaacctttgttttgattcagccagttgaaaacactctttttgtagaatctaagaaggcacatttcagagaacattcaaacctacagttaaaaaccttatatctcaagataaaaactagaaacaagctatatatgagaatgctttatgatgtgtggattcaactcacagagttaaaccttgttttgattcagcaggttgaaaacactctgtttgtagaatctataaagaaacattttgaagcccatgaagaagtatatgaaaaaaacaaatatcctgtgatgaatactagaaacaatctatttgtgaaaattccctgtgatgtgtggattcatctcacagagttaaacctgtgtttttattcagcaggtttaaatcactgttttgtagaacctaagaagggatattttggagcccactgtggcctgtactaaaaaactgaatatcccacgataaaaactagaaccaagctatctgtgaaaatgctttatggtgtgtcatttcatgtcacagagttaaaactttgtttttattcagcaacttaaaagtactttttttgtagaatttaccaaagcacatttcagagcctattgaggtctacaatgaaaaactaaatatcccacgataaaaactagaaacatgctatcagtgaaaatgctttgcaatgtgtggattcatctcacagagttaaacatttgttttgatttagcaggtctgaacaactctatttgtagaatctacgatgagacatgtaaaagcccaatgaggcctctaatgaaaaacagagtattccgcgataaaacctaggaatgatttatctgtgaaaatactttgtgatgtgtggagtcatctcacagagttaaacctttgtttttatgcaataaattagaaactttttttgtagaaactatggagggacatttaggagcccatttagacctctactaaaaaagagaatatcccactataaaaactagaaacaagttatctgtgaaaatgtttgtgatgtgtggatttgtctcacagagtaaaacctatatttatatacagtaggttggaaacactcttttagtgggatctaaaagaaggcctttctaagctctttgtggattacagtaaaaattctttttttttactgtaatatataaatatatatatatatatatatatataaatataggggatagaatatcccctataaaaactagaaacaaacaatctctgaaaattctttgtgatgtgtcaatttatctcacagagttaaacctttgctttaattaagcactctttttgtagattctacgaagggacattctgaaacagcttgaagcctatagtcaaaaaccgattataccatgattaaaactagaaacaagctgtcagtcaaaatgcattgtgatgtgtagatttctctcacagagttatacctttttttaattcagccagctggaagcactattttcgtagaacctacgaagggacatttcagagctcataaagaagtatattgaaaaactgaatatctcgctatgaaaattaaaaacaagctatttgtgaaaatgttttgaaatgtgtggattaatctcacagaattaaacctttgttttgattaagcaggttaaaaacactctttttgtagaatctactaagaaacaattcatagcccattgaggcctctagtgaaaaactgaatattccataataaaaactagaaacaagctatctgttaaaaagctttgcaatatgtggactcttcttacagagttaaacatttgtttttattcagcaggttggaaacactctttttgtagaatctaagaaggcacatttcagagccaactgaggcctataataaaaaaccaaatatcctgggataaaaaatagaaataagctatatgagagaatgctttgtgatgtgtggattcatctcacagaattaaccctctgctttggttaagcagatttgaagcacctttttgtagaatctatgaagagacattttaaagcccattgaggcctatagtcaaaaaccaattatcccatgacagaaactagaaacaagctatcagtgaaagtatcacagagttaaacatttgttttgattaagcacattggaaacctgtgaaaatgctttgcaatgtgtagattcttcacacagagttaaacctttgttttgattcagtaggttggaaaaactctctttgtaaaatctacaaagaaacatttcagagcccactgaggcctatatttaaaaaacctgagtattccacaataaaaactagaaaaaacttatctttaaaagtgtcttgcaatgtgtgaaatgatctctcagaattaaacttttgctttgattcagcaggctggaaacattcattttgtagactctatgtagggatctttcagagcctaatgaggcctctaatgaaaagcagagtattcaggccaggcacggtggctcatgcctgcaatcccagtactttgggaggctgaggcaggtggatcatgaggtcgggagatcgagaccatcctggctaacatggtgaaaacccgtctctactaaaaatacaaaaaatttactgggtgtggtggtgggcacctgtagtcccagctactcgggaggctgagacaggagaatggcatgaacctgggaggtggagcttgcagtgagccaagattgcacgactgcacttcagccttgggggacagagcaagactctgactcaaaataaaaacaagaacaacaacaacaataacaaaaaagagtatccagcaataaaactagaaataatctatctgtgaaaatgctttgcaatgtgtggattcatctcacagagtaaaacctttgtttttacacagcaaattaaaagctttttcttgtggaatctacaaagggacatttaggagcccattgaggcctctcatgaaaaaccaaatatcatgtgataaaaactagaaacaagctatctgtgaaaatgtttgcaatgtatggatttatctcacagagttaaacctacagttttatacaacaggttggaaacactctttaaggagaatattttaaaaagacatttctgagctctttgtagactatagtaaaatccaaacatcccctataaaaactagaaagaaataatcggtgaaaatgccttgcaatgtgtggattcatctcacagagttaaaaaccttgttttgattcaggaggttggaaacactctctttgtggaatctatgaagggacattttgaagccctttgaggcctatagtgaaaaaccaaacaccctgtgataaaaattagatgcaagctatatatgaaaatgctttgtaatgtgtagatttatctcacagaattaaacctttgtgtttacacagaattttggaaacactctattaatagaatctaaaaggaaataattctgagcccattgaggcctatagcgaaaaaccgaatatcttgcgataaaaacttgaaacaagctgtctataaaaatactttgtgatatgtggactcacctcaaagagttaaacttttcttttgattaagcaggttagaaacattcttttgtagaatctacaaggggcatttctgaacccactgaggcctatagtgaaaaacagaatattacaggataaaatctagaaaaaacatatctgtgaaaatgctttgcaatatgtggcttcttctcacaatgtaaaacctttgttttgatttagcaagttggaaactctctttttgtacaatttgtgaggagacatttcgaagaccattgaggcatgtagtgaaaaactaaatatcccatgataaaaactagaaacaagctatctgtgaaaatgctttgtgatgtgtggatttagctcacagagttaaacctttgttttttataccacagttttcaaacactcttttagtagaaagtaaaggaagacatttctgatcccatcaaggcctatagtgaaaaaccgaatatccagcgataaaaactagaaacaagctatctgtgaaaatgctttgcaatgtgcagattcatctgacagggttaaatctttgttttgattcaacaggttagaaacagtttttgtacaatctacaaagggacattttggagcacattgacgcctacagtgtgaatccaaatattttgcgataaaaactaaaaataagctattctttgaaaatgctttgtgatgtgtacaatcatctcacagagttaaaccatatttacatacagcagtttagaaacactctttttgtagaatttaagaaggtacaattaagattccattgaagcttatagttaaaaaccaaatattcagcaataaaaactagaaacaagctatctgaaaaatgctttgcaatgtgtgatttgatatcacagagttaaacctttattttgattcagaaaaaaataaacttttttttctggaatctacgaagagacattttggagcccattgaggccaatagtgaaaaattgaatgtctcatgataaaagccagaaacaaactatctgtgaaaatgccttgcaacatgtggattcgtctcacagagttaaacctttgtttttattgagcaggttggaaacactctctttacggaatctgcaaatggacatttcagagcctattgaggcctacactgaaaaaccaaatatcctgcaataaaaactacaaataagctacctgtgaaaatgttttgtgaggtttggattcatctcacagatttaaccctttgttttgattcagcaggtaggaaactctttttctaagatctactctgagacatttctgagcccaatgaggcctatagtgaaaaactgaatatcccactttaaaaaccagaaacaagctatttgaaaatatgctttgcaatatgtggatttctctcacagagttatacctgtgttttgattctgtaggttgaaaaaattcttgttatagaatctatgaggggatatttcaaagtgcactgaggcctatagtgaaaaacagaatatgccatgatgaaaactagaaagaagctatttgtgaaaatgctttgtgatgtgtggatttatctcacagagttaagcctttgtttttattttgcaggttggaaatactcttgttgtagaatctatgaagggacatttcagagctcattgaggcctatagagaaaaatcaaatatcctgcgataaaaactgtaaagaagctacctctgaaaatactttgtgatgtgtgattttatctcagaagttgaacttttcatttgattctgcaggttggaaactctttttttgtagaatctacaaggagacatttcatagcccattgaggcctatagtgaaaaatcgaatatcccttgataaagactagaaacaacctatctgtaaaaatgctttgtgatgtgtagattcattttacaaatttaaacctttgttttgcttcatcaggttggaaactctttgaatctacaaagggacaattcagggcccattgaggcctttagtgaaaaaccaattaccctcagtaaaaactagatataagctatgggtgaaaatgctttgtgatgtgtggattcatctcacaagttaaacctttgttttgattcagcaggttggaaacactcttttaatagagtttatgagggaaaatttcagagcccattgaagcctcttaataaaaactgataagaaatagaaacaagctatctgtgaaaatgctttgtgatgtgtgggttcatctcacagagttaaacctttgttttgattcagcaggttgtaaagattctttttgtaaaatctatgaaggaacactgaaggcctacagagaaacatcgaatattctgcaataaaaactagaaacaagctatttgtgaaaaagctttgctataaatggatctttttcacagagttaaatatttgttattatacacaggttggaaacacatatttagtagaatctaagaggagtcttttttgagtccattaaggcctgtggtgaaaaactcaatatcccacaattaaaactagaaacaggctatctgtaaatatgctttgcaatatatgtttgcatctcacagagttaaattttgggttttattcagcaggctggagacacttattttttacagtctacttcgtgacagtctacttcgtgaggcctaaagtgaaaaaccgagtatcttgtgataaaactacaatcaatctgtgaaaatgctttgcaatgtgtggattcatctcaatgagttaaatgtttgttttgattcagcaggttagaaatactctcttcgtagaatctatgaaggaacatttcggagccctttgaggcttatagtgaaaagctgaatatcctgtgataaaaactagaaacaaactgtctgtgaaaatgctttgtgatgtgtggattcatctcacagagttaaacctttgcttttatagagcagtttggaaacaattttttagtacaatctaaggggacattattgagcccattcattcctatagtgaaaaacaaaatatcctgtcataaaaactaaaacaaactatctgtaaaaatgttttgcaatgtgtggattcatctcaaagagttaaacctctgttttgattcagcaggttggaaacactctttttgtagaatctgcaaagcaacatttcagaccccattcaggcctatagtgaaaaatcaaatatcccgcaataaaaactagaagcaagctatccatgaaaatgctttgtgatgtgtggatttatctcactgagttaaacgtttgttttgattcagcagcaaatgtcctgcaataaaaactacaaagaagctatgactaaaaatgctttgtgatgtgtgactttatctcacagagtttaacctttcttgtcattcagcaggttggaaacactctttttctacaatctacaaaggtacattttggagcaaattgagggttatactgaaaaatcgattatctcacaatacaaactaggaaaaagttatccgtgaaaatgcttcgcaatgtgtgaatccatctcacaaatttaaacctttgtgttcattcagcaggttaggaatactttttttgtagaatatacaaagggacatttgacacctttggaagcctatagtaaaaaagcaattatttctcaataaaaaatttgtctctgaaaatgctttgtgatatgtggattcttttcacagagtaaaacgtatgtttttatcccacaggttggaaacactgttgttgttgaatatgcgaagggacatttcagagctaattgaggcctatagtgaaaaaccgaatatcccatgataaaaactataaagaagctatctctgaaaatattttgtgatgtgtgattttcatctcacaagttgaacttttgtttttattcagcaggttagaaactccttttgtagaatctacgacgggacatttcatagcccattgaggcctacagtgaacaaacaaatatgccttgataaaaactagaaacaacttatctgtgaaaatgctttgcaatgtgtatattcatcttacaaatttaaacctttgttttgcttagccggttggaacctctttgtttgtagaatctacaagggaatattttgggactcattgaggcctatagtgaaaataacatatctcacggtaaaaactagaaaaaagctatgagtgaaaatgctttgcgatgtatgggtttatctcacaatattaaacctttgttttgattcagcaggttgaaaacactgttttcgtagaatctatgaagggacattttggagcctattgatgcctatggtgaaaaactgaataccccacaataaaaactataaacaacctatctgtgaaaatgctttgcaatatgtggattcatctcacagagttgaacctttgtcttgattcagcatgtttgaaatactgtttttgtagaatctacaagggataatttcagagcaaattgaggcctatagtataaaatctaatatcctgcaataaaaactagaaaaaatctatctgtaaaaatgctttgtgatatgtgggttcatctcacaaaggtaaatctttattttgattcagcaagttggaaacacttttctttgtagaatctacaaggggacatttcatagcccatggaggcctatagtgaaaaactgaatattccatgatagaaactaaagaagctatatgtgaaaatactttgcaatgtgtggtttcatctcacatagtttaaactttattttgattcagctaggttggaagcattctttttgtagaatatatgaagggacattttggagtccatggaggcctatagtgaaaaactgaatattccatgatagaaactaaagaagctatatgtgaaaatactttgcaatgtgtggtttcatctcacatagtttaaactttattttgattcagctaggttggaagcattctttttgtagaatatatgaagggacattttggagtccattgaggcctatagtgaaaaaccaaatatcccatcattaaaaactagaactaagctatctgtgaaatagctttgcaatgtgtggattcatgtcacagagctaaacttttgtttctatacagcatattggaaacacactattagtagaatctaagatgggacaattcagagccttttgaagcttatagtaaaaaattcaaaatgtggcaaaatttacatacaaactatctgtaaaaatgctttgtgatgcgaagattcatctcacagtgttaaacatttgttttgattcagcatgttggaaaaaattttttgtagaatctacaaagggacttttcggagcccattgagaccaatattgaaaaaatgaatatccagctataaaaactagaaacaagctctcggtgaaaatgctttgcaatgtgtggattcatctctcagagttaaacttttattttgattcacccagttggagacacttaattggtagaatctattaggggacatttcatagcccattgaggcatgtggtgaaaaactgaatatcccgcaataaaaacctgaaacaagcgacctgtgaaaatgctttgtgatgtgtggattcatctcacagagttaaacctttgtgttgattcagtagggttggaaagactttttttagaaactacaaaggaacattttgtagcccattgaggcctatagtgaaaaaccgaatatccggtgataaaaactagaaacaagctatttgtgaaaatgctttgcattgtatagatttatctctaatagtcaaacctttgtttttatactgcagttttgaaacgttattttagtagaacgtaaaggaagacatttctgatccctttgaggcctatagtgaaaaaccgaatatcccacaataaaaactagaaacaagctgtgaaaacgctttgggatgtgtagattcatctgacactgtgaaaatgctttgtgatgtgtagattcgtctcacagagttaaactttgattatatacagcaggttggaaacatttattttgtagcatttaagaaggtacaattaagagtccattgaagcctacagtgaaaaacccaatatccagtgataaaaactagaaacaagctgtgaaaattctttgcaacatgtggattcatctcacagagttaaacctttgttttgattcagtaggttggaagcaactctttttttgaatctacagattgacattaaagagcccattgaggcccatactgaaaaactgaatatcctgtgataaaaactagaaacaagctgtctgtgaaaatgctttgcaaggtttagattcaactcacagagttaaacctttgttttgattcagcaggagggaaacaattttgtaaaatctactatgagacatttcagagcaaattgaggctgatagtaaaagtccaaatatccctcgatataaacctgaaacaagcaatctgtgaaaataatttttgatgtgtagattcctctcaaaaagttatacctttgttttgaatcagcaggttgaaaacactttttttgtgtgtaatctatgaagggacaagctatctgacaaggatttcagagcccattgaggcgtatagtgaaaaacaaaaaattccaaactatctgtgaaaatgctttgcaatatgtggattcatctcacaaagataaaagtttgttttgattcagcaggttggcaacactgtttttgtagaatctataagaggacatatttacaagaggtccactgatgcctatggtgaaaaactgaatatcccactttaaaaactagaaacaagctatctgaaaatatgctttgtgatgtgtgcattcctttcacatagttatacctttgttttgattcagaagtttgaaaacactcttgttatagaattttcgaagggacatttcagagtgcaatgaggcctgtagtgaaaaaccaaatatctcacaataaaaactagaaacaagatatttgtgaaaatgctttgccatgtgtgaatttatctctcatatttaaacctttattttgattcagcctgttggaaacactctttttatagaatctaaaaaagaatatttcaaagccgctagatggctatactgaacaaccgaatactccacgataaaaactagaaacaggctatctttgaaaatgctttgtgatgtgtggattcatctcacagagttaaagctttcttgtgattcagcaggttggaagtactctttttgtagaatctacaaggggaagttttggagcaaattgaggcctacattatacaatcgaatattctgtgataaaaacgaaaaaaaaaatctagctgtaaaaatgccttgtgatgtgtggttttacctcacaaagttaaatatttttttttttgattcaacaagttggaaacaccttttctgtagacctacgaggggatatttcatagctcatggaagcatatagtgaaaaactgaatatcccgtgatggaaactaaggaagttatatgtgaaaatgctttgcaatgtgtggttgtatctcacagagtttaactttcttttgattcagctaggttagaaacactctttatgtagaatgtacaaagggacatttcagagccgattgaggcccatttcaaaaaaccatatatcctgtgacaaaaacaagaagcaagctatctgtgaaatagctttccaatgtggggatatttcagagacctttgagaccaatattgaaaaaatgaatatcctgcaatgaaaactagaaacaacctcttgaagcccattgaagcctatagcaaaaaactgaatatcccatgataaaaaatagaaacaagctatttgtgaaaatgctttgtgatgtgtgagttcatctcacagagttaaaccattgttttgattcagctggtagaagacacttaactggtactactagaggacattttgtagcccactgaggcctgtggtgaaaatccaaatatcccatgataaaactagaaacaagctatctgtgaaaatgctttgtgatatgtgggttcatctcacagagttaaaccttgttttgattcaccaggttggaaagactctttttgtagaatatatgaagaaacatttcacagcccattgaggcctataatgaaaaactgaatatccggtgatacaaactagaaacaagctatttgtgaaaaagctttgtgatgtgtggatttctttcacagggttaaatatttgttattatacatcaagttggaaacacatatttaatagaatctaagaggagtctttttgagcctattaaaatctgtagtgaaaaaccaaatatcccatgattaaaactagaaacaggctctctgtaaatatgtttgtgatatatggatgcatctcacatagttaaattttggtttttattcagaaggttggagacacttatttttttcaatctacttggtgacaatacagttctcattaatgccaatagtgaaaattcaaatatcctgtgataaaattacaaacaatctgtgaaaatgttttgcaatgtgtggatttatctcaatgagttaaatgtttgttttgattcagcagtttggaaacactctgtgcgatgtgtggattcatctcacacagttaaacatttgttgccattcagcaggatggaaacaatctttttgtagaatctacaagggtcattttgacacccgttaaggcttatagtgaaaacctggatatcctgagataaaaactagaaagaagctatgtgtgaaaatgctttgcaatgtgtaaattcacctcatagagttaaaccttcattttaattcagaaggttggaaacactttttttgtagaaaggacattttggagccttttgaagcctatggtgaaaccagaatatcccacaataaatattagaagcaaggtatctgtgaaaatgctttgtgacatgtggattcatcttacagaattaaacctttctcctgattctgcaggttggaaattctccttttgtagaatctacaaagaaatattttggagcccattgaggctcaaatatcctgcaataaacactagaaactagctatctgtgaaaatgattggcgatgtgtggattaatttcacaaaattaaaactttgttttgattcagcacttttgaaccactttttttgtagcatctacgaaggaacacttcagagtcctttgacagaaagggttatagagggttatagagaaaaacggaatattccatgataaaaactagaagcaagttctctgtgaaaattctttgcaatgtgtaaattcatctcacagagttaaacctttgcattgattcagcaagttggaaacactctcttgtacaatctatgaggggatatttgggagcccgttgaggcctatagtaaaaatttgagtgtcccataagaaaaactaggaagaatttatgtctgaagatgctctgtaatgtgtgatttcatctcacagctttaaacctttcttttgattctgtaggttggaatcactatttttcttagaatctatgaaaagacattttggagcaaaatgaggactataatgaaaaattgaatatcccacaataaaaattagaaacaagctgtctgtgaaaatgcttggcaatgtgtggattcatctcacacatctcacagagttaaacctttgttttgattcagcaggccaaaattactcttttggtaaaatctacgaaggaacattttggagcccattgatgcctgaggtaaaaaactgaaaactgaatatcttgtgataaaaactagaaacaagctttctgtgaaaatgctttacaatgcatcattttatgtcacagagttaaatctttgttttgattcagctggttaaaaacactcttgtagaaactatgagaggacatttcagaacatgttgaagtctatagtgaataacaaaatatcccgcaataaaaactagaagcaagctatctatgaaaatgctttgtgatgtgtgcatttatcttgcagatctaaacattgttttgattcatcaggtgagaaacacccttttgatgcaatgtacaaacggacgtttcagagcccactgagccccatagtcataaaaccaaatatcctgctataaaactggaaacgagctatctgtgaaaatgttttgtgatgtgtggattcatctcatatagttaaccctttattttgattcagcaggatgaaaacactctttgtgtaaaacctacaaaagggaggttggaaacactcttattgtgaaatttacgaagggacattttggagcccactgaagcctatgtgaaaaaccaaatatctcaccattaaaactagctaaacaaactacccatgaaaatgcttggccatatgtggaataattttacagagttaaatctttgtttttattcagcaagttggaaatgctctcttgtacaatctacgaggggacattttggagcccattgaggcctatagtaaaaaatcaagtgtcccgtaataaaaactacaaagaatctatgtctgaaaatgttctgtaatgtatgattttatctcacagagttaaactgttgttttgtttcagcaggttggaaactctcttttggtagaatcttcaaagagacatttgagagcccattgaggcttggagtgaaaaaccaaatatccagcaataaaaactagaaacaagcaatctgcaaaaatgctttgtgatgtgttcatttattttgcagagttaaaacttcattttgattcaacaggttaaaaacactcttgtagaatataggaagtgacatttctaagcccattgaggcctatactgaaaaactgaatatctcacaacaaaaactagaaaaaaatctatctgtgaaaatactttgcaatgtgaggatttatctcacagaggtaagcctttgtattaatacagcaggctggaaacactctttttgtaaaatctacaaagggacatttcatagaccattgaggcctacagtgaaagatcaaatattttgtgattaaaactagaaaaaagctatctgttaaaatgctttgcaatgtttggattcattttacagagttaagcctttgtttggattcagcaggttgaaaacactctttttgtagaatcaacatagggacatttcagagcacattgaggcctacggtgaaaaacccaacatcccatgataaaaactagattcaagctatctgtaaacatgctatgcaatgtctggattagcccaaaaaagttaaacctttaatttgattcagcaagtaggaaacactgttcttgtagaatctaagaagggacacttcagagcccatttaggcctagagtgaaaacccacttatcctgcgataaaaactagaaacaagctatctgtgaaaatcttttctgatgtgggcattcatctcaaagagttaaacctttcttttgattcagcaggttggaaacactcttttagtagaatctacagagggacagtttggaacctatttagacccatagtcaaaaaagcaaatatcccacaataaaaactagtaacaagctatctgtgaaaatgctttgcaatgtggggattcatctcacagagtcaaacctttgtttggattcagcaggatgaaaacacactttttgtaaatctacaaagaggactttggaaaaactctttttatgaatctacaaagggacattttggagcccattcaggtctacagtagaaaaccaaatattccaggataaaaactaaaaacaagctatctgtgaaaatgcttcttgatgtgtgcattcaccaaatataggtaaactttttttttgattcagcaggttggaaaccctctttttatagaatctacaaaggggcatttcgaagcccattgaggcctatagtgaaaaattgaacattcaacaataaaaactagtaacaagctatatttgaaattgctttgtgatgtgtgggttcatctcactgttacatcatcattttgatttagcaggttggaaatgctcttttgtagaatctatgaaggaacatttggaatcgcattaaagcctatagagaaaaactgaatattctgcaataaaaactaggaacgaggtatctgtgaaaatgctcttcgatgtgtgcattcatctcacagagataaacatttcttttgagtcatcagattggaaactctttttgtagaatgtacaaaggaacatttcagagcccattggggcctatagagaaaaacctaatatctcatgataaaaactagaaacaaaatatctgtgaaaatgctttgcgatgtgtggattcatttcacaaagttaaatctttagttttattcagtaggttgaaaacattctttttgcagaagcaaaaaaaaaagggacgtttcaaagtccattggggcctacagtgaaaaacctaatacccagcgataaaaactagaaaaaagctatctgtgaaaatgctttgtgatgtgttcactcatttcacagagtttaacatttgctttgattcagcaggttggaaacactcttttgtagaatctacgaagaaacatttcatagcccatataggcctattctgaaaaaccaaatatactgtgataaaaactagaaactacctatctgcaaaaatttgttgcaatatatgaattcgtctcaaagggttaaacctccattttgattcgacacattgaaaatactcttttctagatcctatgaagtgacatttcagagcccattgaggcctatagtgaaaaatctaatatcccaccataaaaactagaaaacagctaattgagaaaatcctttgcaatgtgtgaattcatctcacagagttaaacctttattttgattcagcaagttggaaaccctcgttttctagaatctatgaagggacatttcaaagcccactgaggcctacagtgaaaaaccaaatatcccacaataaaaactagaaaaaactctttgagaaaatcctttgcgatgcggggattcatcccacagagttaaacttttgttttgattgatcaggttgaaaatgttctatcagtaaaatctatgaagggcaggttgaaaacactctttttgaagaatctacaaagggacattttggaacccattgaggcctgtagtgaaaaaatgaactttctgtggtaaagactagaagcaagtattgcgggatgtggccagcagcctgcaatgcaacagggctctctctttgttcccaggtggattggcaggtggagaaataatagacacacaaaagatagagaaagctggatccaggggggtcactgccttctggtcccatgatgccaacaatgcactggatataccagcacttattattaagtttagtgagggtggtgataggttagtgagggatttagggtcatttgattatgaggtgagatggtcacatggggatgaagtaattctttaacataacatctgtgtgcagaaatacagtatacagagataagaatttataatatagtgtgtgcatcagtaatttctaacagagccttaaaacagaaacacagtctttccataacctatgattagcaagatattaatcagcagtaacagttgcagcaaaagctggttacaaataatctgtagaaacaggaagtgaagctagacaacctgttagaccagaaattctcagaaggaagtatgccttaaccttaaagaggcctagaaaagccatggcaagaaaagggcgtttatagctctatcttatccatatggacaggtgccccccaagcgtctgtttataggctctccacaagggtcacattccattcccagagctatgaacatctgcttttctgggataggaatcttggtgatgtgaaacctccctgactgcacatccattcataggctctctgcaggaggaagcacatcatgcgttgttggctcattctggcagtccaacctggcattgtctttctacaatcctgcatgcaattttgcatttacaataatcaggagcatttcatcttttattccatagcaatagtttcagggggtctccctacaagcaagtatctgtgaaaatgcttcgtgatgtgtacagtcatctcacatatttaaaccttagttttaatttaacctttggaatcactcttactgtagaatctacaaagggatatgtcaaatcccatttattcctatggagaaaaattgaatatcccatgataaaaactagaaacaagctatctgtgaaactgctttgcgatgtatggattcatctcacagagttaaaactttgttttgattctgcagtttggaaacactctttttgtagaaactgcaaagggacatttcagagcccactgaggcctacagtggaaaacaaaatatcctatgataaaaactagaaacaagctatctgtgacaatgttttttgatttttgcattcatctcacagagttaaactttgttttgattcagcaatttggaaacactctttttctagaatctacaaagggacattttggagccaactgaggcctgtagtgaaaaaccaaaagtccagagacaaaaaggagacacaaattatctgtgaaaatgctttgcaatgtgcagattcatctcacagagttaaacctttgttttcaatcagcaggttgaaaatactctttttgtagaatctaagaagtcacatttgagagccaagtgaggcctatagtaaatgaacacatatcccatgataaaaagtagaaacaagatacatgtgaaaatgctttataatgtgtggattcatctcacagaatcaaccctttgctttgattaagcagatttgaagcactgttattgtggaatctacaaagccatattttgaagcccattgtagcctatagtcaaaaactgattattctgtgagaaaaactagaaacaagctatctgtaaaaatgctttgcaatgtgtggattcatctcacagagttgaacctttattttttattttattttattattattatattttaagttttagggtacatgtacacaatgttcaggttagttacatatgtatacatgtgccatgctggtatgctgcacccattaactcgtcatttagcattaggtatatctcctaatgctaccccctcccccctccccccaccccacaacagtccccagagtgtgatattccccttcctgtgtccatgtgttctcattgttcagtacccacatatgagtgagaatatgcggtgtttggttttttgttcttgtgacagtttactgagaatgatgatttccaatttcagccatgtccctacaaaggacatgaactcatcattttttatggctacatagtattccatgatgtatatgtgctacattttcttaatccagtctatcattgttggatatttgggttggttccgagtctttgctattgtgaatagagccacaataaacatatgtgtgtgtgtgactttgtagcagcatgatttatagtccttcgggtatatacccagtaatgggatggctgggtcaaatggcatttgtagttctagatccctgaagaatcgccacactgacttccacaatggttgaactagtttacagtcccaccaacagtgtaaaagtgttcctatttctccacatcctctccagcacctgttgtttcctgactttttaatgatggccattctaactggtgtgagatggtatctcattgtggttttgatttgcatttctctgatggccagtgatggtgagcattttttcatgtgttttttggctgcataaatgtcttcttttgagaagtgtctgttcatgtccttcacccactttttgatggggttgtttgtttttttcttgtaaatttgtttgagttctttgtagattctggatatcagccctttgtcagatgagtaggttgcaaaaattttcttcccttctgtaggttgcctgttcactctgatggtggtttcttttgctgtgcagaagctctttagtttaattagatcccatttgtcaattttggcttttgttgccattgcttttggtgttttagacatgaagtccttgcccatgcctatgtcctgaatggtgatgcctaggttttcttctagggtttttatagttttacatctaacatttaagtctttaatccatcttgaattaatttttaaataaggtgtaaagaatggatccagtttcagctttctacatatggctaggcagttttcccagcaccattcattaaatatggaatcctttccccattgcttgtttttctcaggtttgtcaaagatcagatagttgtagatatgcggcataatttctgagggctctgttctgttccactgatctatatctccgttttggtaccagtaccatgctgtttttggttactgtagccttgtagtatagtttgaagtcaggtagcatgatgcctccagctttgttcttttggcttaggattgacatggcaatgtgggctcttttttggctccatatgaactttaaagtagttttttccaattatgtgaagaaagtcattggtagcttgatggggatggcattgaatctgtaaattactttgggcagtatggccattttcacgatattgattcttcctacccatgagcatggaatgttcttccatttctttgtatcctcttttatttccttgaggagtggtttgtagttctccttgaagaggtccttcacgtcccttgtaatttggattcctaggtatttcattctctttgaagcaattgtgaatgggagttcactcatgatttggctctctgtttgtctgttattggtgtataagaatgcttgtgatttttgtacattgattttgtatcctcagactttgctgaagttgcttatcagcttaaggagattttgggctgagacaatggggttttctagatatacaatcatgtcgtctgcacaaggggacaatttgacttcctcttttcctaattgaataccctttatttccttcccctgcctgattgccctggccagaatttccaacactatgttgaataggagtggtgagagagggcatccctgtcttgtgccagttttcaaagggaatgcttccagtttttgcccattcagtatgatattggccgtgggtttgtcatagatagctcttattgttttgagacacgttccatcaatacctaatttattgagagtttttagcatgaagggttgttgaattttgtcaaaggccttttctgcatctattgagataatcatgtggtttttgtctttggttctgtttatatgctggattacatttattgatttgcatatattgaaccagccttacatcccagggatgaagcccactcgatcatggtggataagctttttgatgtgctgctggattcggtttgccagtattttattgaggattttttcatcaatgttcatcaaggatattggtctaaattctcttttttggttgtgtctctgcctggctttggcatcaggatgatgctggcctcataaaatgagttagggaggattccctctttttctattgattggaatagtttcagaaggaatggtaccagttcctccttgtacctctggtagaattcggctgtgaaaccatctggtcctggactcttttggttggtaagctattgattattgccacaatttcagatcctgttattggtctattcagagattcaacttcttcctggtttagtcttgggagagtgtatgtgtcgaggaatttatccatttcttctagattttctagtttatttgcacagagatgtttgtagtattctctgatggtagtttgtatttctgtgggatcggtagtgatatcccctttatcatttttttgtgtctatttgattctgctctctttttgtcattagtcttgctagtggtctatcaattttgttgatcttttcaaaaaaccagttcctggattcattaattttttgaagggttttttgtgtctgtatttccttcagttatgctctgattttagttatttcttgccttctgctagcttttgaatgtgtttgttcttgcttttctagttcctttaattgtgatgttaggcttgtgtctttgttctcgttggtttcaaagaacatctttatttctgccttcatttcgttatgtacccagtagtcattcaggagcaggttgttcagtttcaatgtagttgagcggttttgagtcagtttcttaatcctgaattctagtttgattgcactgtggtctgagagacagtttgttagaatttctgttctttacatttgctgaggagagctttacttccaagtatgtggtcaattttggaataggtgtggtgtggtgctgaaaaaaatgtatattctgttgatttggggtggagagctctgtagatgtctattaggtctgcttggtgcagagctgagttcaattcctgggtatccttgttaactttctgtgtcattgatctgtctaatgttgacagtggggtgttaaattctcccattattattatgtgggagtcttaagtctctttgtaggtcactcaggacttgctttatgaatctgggtgctcctgtattgggttcatgtatatctaggatagttagctcttcttgttgaattgatccctttaccattatgtaatggccttctttgtctcttttgatctttgttggattaaagtctgttttatcagagactaggattgcaacccctgcctttttttgctttccatttgcttggtagatcttcctccatccttttattttgagcctatgtgtgtctctgcacgtgagatgggtttcctgaatacagcacactgatgggtcttgactctttatccaatttgccagtctgtgtcttttaattggagcatttagcccatttacatttaaagttaatattgttatgtgtgaatttgatcctgtcattaagatgttagctggttattttgctcgttagttgatgcagtttcttcctagccttgatggtctttacattttggcatgattttgcagtggctggtactggttgttcctttccatgtttagtgcttccttcaggagctcttttagggcaggcctggtggtgacaaagtctctcagcatttgcttgtctgtaaagtattttatttctcctttacttatgaagcttagtttggctggatatgaaattctgggttgaaaattcttttctttaagaatgttgaatattggcccccactctcttctggcttgtagagtttctgccgagagatctgctgttagtctgatgggcttccctttgtgggtaacccgacctttctctctggcttcccttaacattttttctttcatttcaaccttggtgaatctgacaattatgtgtcttggagttgctcttcttgaggagtatctttgtggcgttctctgtatttcctgaatctgaatgttggcctgccttgctagactggggaagttctcctggataatatcttgcagagtgttttccaacttggttccattctccctgtcactttcagtacaccaatcagacgtacatttggtcttttcacatagtcccatatttcttggaggctttgttcatttctttttattcttttttctctaaacttcccttctcacttcatttcattcatttcatcttccatcactgataccctttcttccagttgatcgcatcggctcctgaggcttctgcattcttcacgtagttcttgaaacttggctttcagctccatcagctcctttaagcacttctctgtattggttattctcgttatacattcatctaaatttttttcaaagtttttaacttctttgcctttggtttgaatttcctcctgtagctcggagtagtttgatcatctgaagccttcttctctcaactcgtcaaagtcattctccatccagctttgttccattgcaggtgaggaactgcgttcctttggaggaggagaggcgctctgctttttagagtttccagtttttctgctctgttttttccccatctttgtggttttatctacttttggtctttgatgatggtgatgtacagatgggtttttggtgtggatgtcccttctgtttgttagttttccttctaacagacaggaccctcagctgcaggtctgttggagtttgctagaggtccactccagaccctgtttgcctgggtatccacagcggtggctgcagaacagcggattttcgtgaaccgcgaatgctgctgtctgatcgttcctctgcaagttttgtctcagaggagtacctggctgtgtgaggtgtcagtctgcccctactggggggtgcctcccagttaggctgctcaggggtcaggggtcagggacccacttgaggaggcagtctgcccattctcagatctccaactgcgtgctgggagaaccactgctctcttcaaagctgtcagacagggacatttaagtctgcagaggttactgctgtctttttgtttgtctgtgccctgcccccagaggtggagcctacagaggcaggcaggcctccttgagctgtggtgggctccacccagttcaagcttcccagctgctttgtttacctaagcaagcctgggcaatggcggatgcccctccccgagcctcgctgccaccttgcagtttgacctcagactgctgtgctagcaatcagcaagactccgtgggcgtaggaccctccgagccatgtgtgggatataatctcctggtgcatcgttttttaagcccgtcagaaaagcgcagtattcgggtgggagtgacccgattttccaggtgccgtctgtcacccctttctttgactaggaaagggaactctctgatcccttgtgcttcctgagtgaggcaatgcctcgctctgcctcgggtcatgcacggtgcactgcacccactgtcgtgcacccactgtctggcactccctagtgatatgaacctggtacctcagatggaaatggagaaatcaccgtcttctgcatcgctcacgctgggagctgtagactggagccgttcctattcagccatcttggctgcctacctgaacctttattttgattcagtaggttggaaaaactctttttgtagaacctttgaaggaacatttcagagcccattgaggcctatatttaaaaactgaatatcccacaatgaaaaccagaaacaacctatctgtaaaagtgttttgcagtgagtgggatgatctctcacaattaaaacttccttgtgattcggcaggctggaaacactttttgtagaatctatgtagtgatcttttgaagcctaaagaggcctctaatgaaaaacagagtatcctgcaataacaactagaaataatctatctatgaaaatgctttacaatgtatggattcatctcagagttaaacctctgattttatagagcaaattggaaacttttttttgagaaatctacaataggacatttaggagcccattgagccctctagtgaataaccaaatatcccacaataaaaactagaaacaagctatctgttaaaatgtttgtgatatgtggatttctctcacagagttaaacctatatttatatacagcaggttggaaatgctcttttagtagaatctcatagacatttctgagatctttgtggcctatagtaaaaaaacgaatattcccctataaaaactaggagcaaacaatctgtgaaaatgctttgcaatgtgtggattcatctcacagagtagaaccttgtcttaatatagcaggttggcaacactctttttgtagaatctacaaagggaaattttggagcccattcaggcttatagtgaaaaactgagtatcacataataaaaactagaaaaaactatctgtgaaaatgttttgagatgtgtgaattcatctcacagaggtaaacctctgtttatattcagcaggttgaaaactctcattttatagaacctaaggagggacatttcagagccttttgaggcctatagtgaaaaaccaaacatcccacaataaaaactagaagccagctatatctaaaaatgctttgcagtatgtagattcatctcacagagttaaacctttatttttatacagcatattgtgaacactcctttagtagaatctgagaggggacaattctgtgcccactgaggcctatagtgaaaaacagaatatcccccaataaaaacttgaaacaagctatctgtgaaaatgctttgtgatgtgtggattcagcttaaagagttaaacttttgctttggttccacaaattagaaacattctttttgtagaatctatgtagggcatttctgagcccagtgaggcctatagtgaaaaaccgaatatgccaatataaaaattagaaaaaaatttttgtgaaaattctctgtgatatgtggattcatctcacaatgttaaacctttgttttgattcagcaggttgaaaaatctgtttttgtgcaatctttgaggagacattttaaagcccattgaggcttatagtaaaaaccgaatatcccatgacaaaaattatatgaagctatctctgaaaatgctttgcaatgcgtgatttcatctcacagagttaaacctttctttcaattcagcaggttggaaacacttcttttatagaatctatgaagggacatttcagagcccattgaggcttatagtgaaaaacagaatagcccaagataaaaactagaagcaacctatctgtgaaaatgctttgtgatgtgtgaattgatctcacagagttaaacctttgttttgattcagcaggttggaaacacttcttttgtagaatcaataaaggaacatttctaagcccattgaggcctttagggaaaaaccaatatctctgattttcaagacacagattttcagagatagattttcaagctatctctgaaaatctttgcaatgtgtggatttatatcacagagttaaacctatgtttatatgcagcaggttggaagtatctaaaagaagatatttctgagccctttgaggcctatagtgaaaaacataatatcccccaataaaaactgaaaacaaactatctgtaaaaacgcttcacaatgtgtggattaatctcacagaacccttgctttgattcagcaggttgtaaacaatctttttgtagaatttatgaagggacatttcggagcccatggaggcctacagtaaaaaactgaatatcacatgataaaaactagaaacgagctatctgtgaaaatgctttgtgatgtgtggtttcatctcaaaaacttaaacctttgcatttattcagcaggttgggtacagtttttttgtagaatatacaaagggacatttcacacccattgacacctatagtaaaaaatcaatgttttgtgataaaaacaatgaaaaaccaacttctgaaaatgctttgcaatgtgtggattcatctcacatatttaaacttttgttttgattcagcaggttggaaacactgtctttgtagaatctatgaagtgacatttcagagcccattgaagccaatagtgaaaaaccgaatattttgcaataaaaactaaaaataactattctgtgaaaatgctttgcgatgtgtggattcacctcacagagataaacctttgttttgattcagcaggttgaaaagatgtttttatacaatctaagaaaagacattttgaagcccattgaagcctatagtgaaaacccaaataccccgtgataaaaactacgaacagctttttgtgcaaatgctttgagttgtgtggattcacctcacagagataaacctttgttttgattcagcaggttggaaagacgtttttgtacaatctaagaaaagacattttgaagcccattgaagcctatagtgaaaaatcaaatatcccgtgataaaaactacaaacagctatttgtgaaaatgctttgtgttgtgtggattcatctcacagatttaaaactttgttttaattcagcagtttggaaacagtctttttgtacaatctacaaaataatgtgttggatccctttgaggcctatagtgagaaaccaaatatcccctgataaaaaaaatagaagcaagttctctgtgaaaatgctttacaatgtatggattcctcttacatagttaaaactttcttctgattcagcaggttgtaaatacttcttttgtaaaatctacgaagcagcatttcagagcccattgaggcttatagtgaaaaacagaatatcccatgataaaaactagaaacaacctaactgtgaaaatactttgcgatgtttgaattgatctgacagagttaaacctttgttttgattcagcaggttggaaacactttttgtagaatcaacaaaggaacaattcagagcccattgaggtctacagtgaggaacaaatatcacttgataaaaactagaaacaagctatctgtgaactagctttgcaatgtgtgagtttatctcacagagttaaaacattttttttttgattcagcaggttggagacacactatttgtataatctacaaggggacatttcagagcccattgaggcctatagtgaaaaactgaatatcttgcaataaaaactagaaacaagctatctctgaaaacctttgtgatttgtggatttttctcacagagttaaacctatgtttatatacagcagattggaaaccttcttttagtagaatctaaaagaagacaatttctgagccttttgaggcctatagtgaaaaattgtatatcctgggataaaactacaaacaatctatctctaaaaatgatttgtgacacgtggattcatctcaaagagttaaatgtttgctttgattcaacaggttggaaagactctctttgtagaatctgcaaagggacattttggaacccattggggcttatagggaaaagctgaatatcctgtgataaaaactagaaacaaactatctgtgaaaatgctttgcaatgttggattcatctcacagagttaaacctttgttttcatacagcaggttggaaacaattttttagtagaatctaagaggggacatttttgagcccattcggtcctatagtgaaaaagtgaatatcctacaattaaaactaaaaacaaccatctgtaaaaatgttttgcaatgtgcggattcatctcaaagtgttaaacttttattttgattcagcaggttggaaacactctttttgtagaatctacgaagcaacattttggagcccattgaagcctatagtgaaaaaccgaatatcccacgataaaaactagaagcaagctatctgtgaaaatgcgttgcagtgcgtggatttatctcacagagttaaaccttagttttgattcagcaggttggatacactctttttgtgcaatctacaaggggacattttggagcctaatgaggcctatagtgaaaaaccaaatgtcacacgataaaaactacaaagaagctatgtctaaaaatgctttgtgatgtgtgattttgtctcacagagtttaacctttcttgtgattcagtgggttggaaacgctctctttctacaatctattgggatacatttcagagcaaactgtggcctatactgaaaaaccaattatcccatgacaaaaactaggcaaaagctatcggtgaaaatgctttgtgatgtgtggatttatctcataaatttaaatctttgtatttattcagcaggtttggaacacttttttgtagactatacgaagggacatttcacacttatggaatcctatagtaaaaaagcaaatatttcatgataaaaacaataaaaatttatctctgaaaatgctttgcaatgtgtggattcatctcaaagagttaaaccattgctttgattcagcaggttagaaacactctctttgtagaatctacaaagggatatttcggagcttattgaggccaacagtgcaaaaccgaatatctcgcaatgaaaactagaaacaaactatctgttaaaatgctctgtgatgtgtggattcatctcacagagttaaacctttgttcccattcagcaggttggaaactatcttttgtagaatctatgaagggtcatttcaaagcccattgaggcctatagtgaaaagagatacctcatgataaaaactagaaacaagctatcagtgaaaatgctttgcaatgtgtgaattcatctcatagagttaaaccttcattttaattcagcaggttggaaacaccttttttgtagaatctaggaagggatattttggagccatttgacacctatagtgaaaaccgaatatcccctgataaaaactagaagcaaggtatttgtgaaaatgctctgtgatatgtggattcatcccacagagtcaaacctttgttttgactcaacaagccagaagcactttctttgtagaatctacaaagagacatttcagagcccatcgagacctatggtgaatagctgaatattccctgataaaaactagaattaagctatctgtgaaaatgctttgcaatgtgtggatcacctctcagagttaaacctttgttttgattcagcagattggaaacactctttttgaagaatcaacaaagggacattttcagcccatgtgcaggtatattgataaaccaaatatcccacaacagaaactagcaactattagtgaaaatgctttgcaatatgtgaattcatctcacagatttaaatatttattttcattcagaaggttgggaacactcgttttgtagaatctacaaaaaagacatttcaaagcccattgtggcttacagtgaaaaaccaagcatttcacaataaaaactaaaaacaatctatctgtgaacataatttgcaatgtgtggattcacctcacagaattaaacctttgttttgattcaacaggttggaaacacttttttcgtagaagctatggagggacattttggagcttattgaggactatagtgaaaaaatgaatactttgtaatgaaaacaaaaaacaatctatatgtgaaagtgctttgtgatgtgtgtattgatctcacagacttaaacctttgttttgtttcagaaggctagaaacactttttttgtaggatatacaaagggacatttcaaatgccatagacaagtatagtgaaacactgaatatcctgcaataaaaactataaacaagctatctgtgaaaatgctttgcaatgtgtggattcatctcccagagttaaacctttgttttgattcagcaagttggagacagtcttattctaagggacgttaaggagcccattaagggaaatttcaaagcccattgagaactatagtaaaagaagaatattccgcaataaaaactagaaaaatctatctgtgaaaatgcttggtgatgtgtgaattcatctcacagagttaaacctttgttttgattcagcaggccaaaatcactttttttgtagaatctacgaagggacatttcagagcccattaaggcctgtagtaaaaaaaaaaaactgattatcttgcgataaaaactagaaacaagctatctgtgaaaatgctttaggatgggtcatttcgagtcacagagttaaatctttgttttgattcagcaggttgaaaacacacttttgtagaaactatgaggggatatttcagagcatattgaagtctatagtgaataatgaaatatcccacgataaaaactagaaacaagctatctgggaaaatgctttgcaatggatgaatctcacagacttaaacctctgttttgatcgagcaggttggaaacattcttgtggcacaatctatggagggacatttcagagctcattgaggcctatatttgtaaaacaaaatatcctgctataaaaactggaaacaagctatctgtgaaaatgcttggtgatgtgtggattcaactcacagagttaaaccttggttttgattcagcaggatggaaacactttttttgtaaaatctacaaaggggaggttggaaacactctttttatgaaatctacgaagatacattttggagcccattgaggcctatagtgaaaaactgagtatcccacaattaaaactagaaagaagctatccgtgaactgcctggtgatgtgaggattcatttgacagagttaaatctttgttttaattcagcagattggaaacactcttttgtagaatctgcgaagggacatttcggagcccattgaggcctatggtggaaaaccaaatatcccatgataaaaactagaaacaagttatatgtgaaaatgttttgtgatgtttggattcatctcagaattaaacctttgtttggtttcagcttgttggaaatactcttttggtagaatcttcaaagagacattttagagcccattgaggcctacagtggaaaaccgaatatcccacaataaaaactagaaacaagctatcagtgaaaatgctttgtgatgtgtttattcattttacagagttaaacctttgttttgattcagcaggttaaaaaacactctttcatagaatctatgaagcaatatttctaagccattgaggtctatactgaaaaactgaatatctcacgataaaaagtagaaactagctattggtgaaaatgctttctgatgtgaggattcatctcacagagttaaaccttggtattgattcagcaggctggaaacatcctttttgtaaaatctacaaagggatattttggagaccattgaggcctatagtgaaagaccaaatatcctgtgattaaaactagaaacaagctatccatgaaaatgctttgcaatgtttggatttattttacagggttaaacctttatttggttcagtaggttggaaacactctttttgtagaatctatgaggggacattttagagcccattgaggcctacagtaaaaaacccaacatcccactataaaaactagaaacaactatctgtgcacatactttgtgatgtgtggattcatctcacagagttaaacctttgttttgattcagcagataggaaacgctcttcttgtagaatctaagaagggacacttcagagcctatttaggcctatagtgaataaccacatatcccgtgataaaaactagaaacaatctatctgtgaaaatgctttgctaagtgtggattcatctcacagatttaaacctttattttaattaagaaggttgaaaacactcttttagtaaaatctacgaaaggcaggttggaagcactctatttttagaatctacaaagggactttttggagcccattgaggcctatagtgaaaaaacctatatcccaagataaaaactagaaacaagctatcagtgaaaatgctttgccatgtgttcattcatttcacagagtcaaaccgttgttttgattcagcaggttggtaatgtgggcagcaagccacccaggcaccgaggcaagagacagaggacacaagctgttccagcataataaaatataaaacaagaatagttataccagatatagatcttagatatgattatatatgaatatcattaatcattggtttgtagtaattactttttattccaatattatgataatcctcactctataacatagcctaggaaaaaccaggccatacagagataggagctgaggggacatagtgaggtgtgaccagaagacaagagtgcgagccttctgttatgcccggacaaggccaccagagggctccttggtctagcggtgacaccagcatctgggaagacgcccattaccaggcggatcatggtccagcggtagcaaaaggcatcaaggaacaacacccgctacttagcagaccgggaaagggtgggggggggggggtctccctttccccaggggagtttagagaagactctgctcctccacctcttgtggagggcctgacatcagtcaggctcgcccgcagttatccggaggcctaaccatctccctgtgatgctgtgcttcagtggtcacactcctagtctgccttcatgttccatcctgtacacctggctctgccttccagatagcagtagtaaattagtgaaaatactaatagtccctgatatgcaaaataatggcgtaagctgtctttccttttgtctcctctccctctctgcctcagctgccaggcagggaagggccccctgtccagtggacacgtgacccacgtgaccttacctatcattggaggtgactcacattctttaccctgccccttctgccttgtatccaataaataacagtgcagccagacattcggggccactactggtctccgcacattggtggtagtggtcccccgggcccagctgccttttctcttgtctctttgtcttgtgtctttatttctacactctctcatcgctgcacacagggagagacctaccgaccctgtggggctggtccccacagtaagacttttttatagaatctacaatgggacgtttcatagcccattgatgcctatagtgaaaaaccaaatatcccgcaataaaatctagaaactagatatttgtgaaaatgccttaggatgtgtgtgcaaacacagccatgtttgctaaagggaatagcacaaagataatctgacccagatggcccatatccatcctcagcctcagatcctggtgagtctgagcctctccccagctcctgctacctctgatgggtcttcaggacttgcttgtcatagcagggctgatactcctgctgagttcccccatttgagtgaggacatgtctggagagaggagagagctggaacagagtcttcccagtgatttccagtgactcaaagaggttttcccaaaagtcttatagtagaagatagagaaagtggggcattacagagaaagcggggcgttcagggccagaccttaggagaatcctctaccccaacccagtgaaggcctaatcttgtgctactttcccttgtaacactgggagaatcagattcatcaagaactttcacctttcctctactgaatttcggttccctttccaatggttccaacatgcccagtaaagtgagttgttccatctgtacaacctggggtggtgtggtgaaggggaaagagaccagctccttctcccacttcccagtgaggcctatgaagaggcaactagactctttctaccaagtggatgaactcaggcctagagttggagttagcagaccactgtgcagaagccatggccctcagcagagataggaacaatgagaaacaaatgtgtgactataggaactgcttctttttttttttttttgagatggagtcttgctcttttgcccaggctgcagtgcagtggcatgatcttggctcactgcaatctccaccacctgtgatcaagcaattctcatgcctcagcctcccaagtatctgggatcacatgcacgtgccaccatgcctggctaatttttgtatttttagtagagatggggtttcaccatgttggccaggctggtctcaaactcctagcctcaagtgatccactgcctcagcctcccaaagtgctgggattacatacaggatgtgttctaagtggacgactcaaggtatacataaaaccaagctttctgtttatacttgtgttagaagaagctgacctcagaagggcaggtgaatatttgggtgagaaaaggcaaaatatggctaaggagcagccaggaggccaggttggctggagtacaggtttattagaagagacagtcatggatggggctattctgggcaaagccctggaggtctggctgagaaactggaattctctgcctatagccccaatgtactaggtggttgttacccaagtacaaagctacagctatgtccttagcttggatttcagaaaataatacatttttaaatcatctgcaagagtctaacacatatgtttatctttggccccaattatataatttcaaaagcatgaatatttttgtacatgtctgtttcttggttgcgcacatcagaagccacctgcagtttacctgaacagaaaaagagtgagtatattggaagaatgttggtgggtcacagaatgggtggggaggcttggccaccagccccaagaaacaggcaggaacccatggaggtgagtcagcaggaagcccagtcaaagatgtgacacaggaacatcacccacagccacagacgctgctgtggatgctctctaacggctcctgtgtcttggcatcatcacgctccccataaccattattcccagctggaggggcccactggtaagccaggagatagggacaggaaacatctggccttttccagctcccacaggcagaggacctcccattaagaccttccaaaagtggaattcccatgaaataggaaggagatctaggtgttacatagccccccaaacagcaaatgttcataattcggaaatattttttaaaagactaatttttctattttttttttagttttagctcaaagacatggtaggtttttaaaggatgtatttaagaaccagattattctattttttaaatacagtattttggaattggcagtataggagaatgggttaaatatatggcctggactcagatcagacctgggtttgaagcccagctctaccatttcctagcagtgtggccctgggcaagaaaattaacctctctgagcctgtgctcttctaaaatggggtcattatagtacttacctcacacctttgaactttgaggtttaagtgagataatgcatgtgaagatcctaccagtgcttggcaccagggaaacactccataaatatcaactattgtcattgagttacctgtcctaaggcctgaaaaatcaacatggtcacattgggccccataccttggggtatgtgggcttggcctgacttaagtccaggcagctagagccacacaagggaaggaggatgtccagatgtccacttggacacatttccccctcattccttgctttttccccttttattgtttaaggccatgggttttgatgttacaggtttggatttgaatccagacctgccagatgatgttgggcacctcacgtgagttatttaacttctctaaccttcaggcttttttcactgcaaaatgagaataatgctatctaccatgtggcagtgctgtaagaaatcagatagtttgtgcagggtgcttagcactgtgcctcataggtgagaagggtcctcattagtatatattcatcctcgtgggttaggggagaagtagcacttcccaagaaggttattttccttctataataccacatgtaaatttatctctttgatgcttaagtcatctggcaaggattgttctggcttctacaaaaaaaaaaggtaaaatcatcttgacagttggaggtgacatctgtggaaaatgctagtgttcatgtagcaaaaacctagaccagatcactgcaagcatgtcttgctttatgaatctgggtgctcctgtattgggtgcatatatatttaggatagttagcacttcttgttgaattgatccctttaccattatgtaatggccttctttgtctcttttgatctttgttggattaaagtctgttttatcagagactaggattgcaacctctgcctttttttgctttccatttgcttggtagatcttcctccatccttttattttgagcctatgtgtgtctctgctcgtgagatgggtttcctgaatacagcacactgatgggtctttactctttatccagtttgccagtctgtgtcttttaattggagcatttagcccatttacatttaaagttaatattgttatgtgtgaatttgatcctgtcattaagatgttagctggttattttgctcattagttgatgcagtttcttcctagccttgatggtctttacaatttggcatgattttgcagtggctggtaccggttgttcttttccatgtttagtgcttccttcaggagctcttttagggcaggcctgacaaaatctctcagcatttgcttgtctgtaaagtattttatttctcctttacttatgaagcttagtttggctggatatgagattctgggttgaaaattcttttctttaagaatgttgaatattggtccccactctcttctggcttgtagagtttctgccgagagatcagctgttagtctgataggcttctctttgtctatatgtctttcttaatacacatttatacaagtaaatgtttttagaagatgtgttcatggctgggtgtgttggctcaaacctgtaatcccagcactttgcgaagctgaagctggagtaccacttgagcccaggagttcaacagcttgcaacaaagcaagacctcatctctatgaagtcttttaaaaattagttgaacatggtggtactcacctgtaatccaagctactcaggatgctgaggcaggagagttgcttgagcccaggaattcaaagctgaagtaagttacacaccactgaactccagcctgggcaacaaagctagaccctgactcaaaaaatatatatatgtgaccgggtgcggtggctcacacctgtaatcccagcactttgggaggccaaggtgggcagatcacgaggtcaggagttcgagaccagcctggccaacatggtgaaaccctgtctctaccaaaaatacaaaaattagctgggtgtggtggtgggtgcctgtaatcccagccccttgggaggctgaggcagagaattgcttgaacccgggaggcagaggttgcagtgagccaagattgtgccattgcactccagcttggacaacagggcaagactccatctcaaacaaatatatatatatgtaattattttattatttatatatgatttttattaaatatatatttgtttaaacaaggtatttaacaactatatatgtgtgtatgtatatatgtgtgtatatatattttttatatatttgttaaaatacattttaaagcttatttatacaccccagcaatttccacactacattttgaaacatattgctctgtgtgcgaaacagaaaatgtcttagctctatggaagccagtccaggttaggtgctgtgtttacacgaaataccaggaggtccagggatttgctgggccctgttccctgtgagtctcaattcaagaggatgacacaagcttagaataaaattaaagcatgactgcaatgccattggtttttatttctttgggtttttttaattagaaacaagaggtgggcggacactgaatcaggtgctcctatgaaagtgtctcccattctgtaattcattaggttgcacatactatggaatgtttgaacttataactttttaagaactatctctatatctttaatgtgtacaccttacattgagaaagccagagttagtccagcctttgtaaaatggtggggaaatgactcgtgccttggaatattagttgcacttgcttctcagcctggaggctgaaaacgcagcagaatcattgtggaacactacacgccctgtctcatctgactgcctcccactttagaaatgaagaaagagagtaaaatcatttaagttttgcctagagttaagttaccttttttttaaagcattcctccttcacctttcagataaaacaacccatatagactgtaccagatacagagatttaatgctttttctgttctcttcaaagacaaaaattttcggtggacttttccatttggtgcatctcctgtgcttggcttgtcaccttagctctgacacaaaggtaatataacccatgactggtgagacataccctctcctttgcagtccacattcagaagatctcatttccatttccagttacacaagtatgagtcccaatgtgggtaaaaagtcttccagaaatgagaaacccagattagctagtcaagttgctccttgcagatgaactaaaaataataatttgtaaagcattaacagtatactagctgaaagcacagactttcattcagacagagctgagtttgaatcctggctttaccaccatgagatgtggggcgagtgaattaacctctcttgtccttcagtgtcttgacttacaatccaagcatacgaatagtacctacctcatagggctgctttgaggattaaatgagatcatgcttataagatattaagtgctagaaagcactggaaattgctagccattattctcatataactctcatgattaccattacttacaaattgcctgaaatccatatggtcactgtggcagattccacgaatgggtccacacaacatctgctttgaccatttctaaaacctacagtgtctggactcttttgtagctagggttctgactgtgacccaggttctgcccagcagatgcctatgtgctccagggagatgaaggtcatataagtgaagtggcagcacatataggtgggtccatatttttgcagacatgactgaaagagctttgagagaagtctcactgtccagctcctagcatcacaggtattgactgctgagcagcagtagtggggcttctatgagaacagtcctgtttatggttgggcatttctgctggggttgtttctggctgtgtggtatcctagcctgcttctctggcactgctggaaatcctgtaagctacctaataccctgctgtaacccctttctattgaaactagctagtgtgaattatgttgtctgcaactaagaacacagtaactatcaaaacaatcaatacagtaattatcaaaataattcttgttactataagggtttttttactagtcatattcaggttactaagggataaataaaagtacgtataaaaaaccttgctcttgccttcaaaatgcatttatcctaaaatatactacgtgagtggagacctgttgtgttttttttaaaaaaaaagttttattttctttggcagcagaaagccttttctgaggaactagcagaataaactgattaaaattgaagtcttacaggaaagaatcctcacttgggtccttattgaggatgacagatgagcctacctggcatagtgttctctagaaattataatgggagagttaaaaggtgcaccagaaagccagtttacgtgtataagtatttggctaggtatgttgtatatagtcattaatgtacttacttctaggatggtatccagggatgtgctcaattacaatgagaagaatgccttgaaagaagtaattaacaagagcattgaaatatctctccagattttgacttaatgaaaaattactgtgtgatgagtacagccctcagtgaagcgtggtttcagttttgccagtttcttatctgctttcattatcattaatagttttaaaaatataacatcaaattctttctctttacaaagactgctcttttttttgagatgggctctcactctgtctcccaggttggagtgcagtgttgcaatcttggctcactgcaacctccacctaccaggttcaagtaattctcccacctcagcctcctgagttgctgggaccacaggcatgcacaaccacactggactaatttttttgtatttttagtagagacagggttttaccatgctgcccaagctggtcttgaactcctcctggcctcaagcaatctgcctgccttggcctcccaaagtgctgggattgcaggtgtcagccatcacagtcagtcacaaagaccgctcttatggtgtgtttttgagtaaccgtggccccactggcaactctcgtcatttttattcaatgcctagtttcccattttctcccttatatacttctggcaaaatataatgacctgttcaaagcagatcagagaacttctcacaatgctgataggcagaatggtcaagtgcttaaggtattgtctgtcttcttcaataaaagaacacaaaaaatgctggacctctggcttagtctatcagttggcatattagtttcctgtggctgctgtaacaaaatgccacaaatttagtggcttaaaacaacacaaatgtattctcttatagttccagaggtcagaagtccaaaatcattttcactgagatttagctaagggtttgcagaaatggctcattctggaggcttcagaaaataatacattttcttgcctttttcagctttgcagggtgcctgtagtccttgcctcacagcccctgcctcacatcactccaacctcctgtttccgtggtcacatctcctactaatcactctgaccctccctgtcccctcttataaggacccttgtgattacattgggcccacgcagataatccacggttgtctccccatctcaagatccttaattcaagtcaaatcttcaaagtccctttgtcatataaggtgatattcacaggttctgggaattagggattactccacctactacaggtgtcaggaaagcaagttctagcttcctcaatcagtgaggacttactagaaggttacatcgagaaaatagtaggaaatcaagaaaaccaacaggcatttgagatacaaggcaaatacatacctggttatcttgctgtcctttcagcagccggtgccttttgctgcagactctagacttctacctttattgtgactgtctttacttccttttctgtctaactgatgattctagtagctctagcagtcaaactgagttagccagaggcccatcctatagagggcgccccttttctgccaggctcttttatgaggaaatctcattgactgctatctaacctacagatagcagcttttgaatcagtcattaatccttggtccactcagctttggccagaaaagctgggccacaagacacaaaatgtgtacaggaaccacgggcctttgtctctgaaaggcgctgggaagttccaagcatttggagatcgttagactcttctccaaaacactgtcagtgatggcagagtttgagcaaaatattttgcttcccaatttttgaaactggaatgtttataggtgcttgttacaaacagatttttgttaatgtttacaaaatatagtattcctaagaaaacaaataagaatggtccaaaaataaagagtgctttggaaagctaaaggcttgtcatgatatcctgtagtctaatcagagactctaattacgggaaaagacatacatatcaccaaacgaagtcttcaagatcatcctggtctttatagctcttcaaattatataaagcaacacactggaattcccaagctctgagtcatccatgaaaaaaacagctcatatgactttcaggacactgaatttaattcagaaaccattttataaatgtctactctctttgacagaggagatctaggaaaagagagaagtaatctggagtgtagcacagaattaaactgacttctctttaatggagacgtagagcctgttacactgcagattcttggatcatgtcagataatcatagcttcagccactggattagtcatatcatgaatttcataatcaccatataattgacacaggcctttaaacagtcatttctcctggaagccagtttattgctggaattaaatgaactgtcactctctgcagaaaatggaacaaacttttcacttggctcaccttggcagtaatcaggagatttctaggaattagcaacaatcctcgccaagctgtccaagtggtaacaagcagattgcccttaagaatgcaaaggttcatactgcccaaagtaatttatagattcaatgctatccccatcaagctaccactgactttcttcacataattagaaaaaactactttaaacttcatatggaaccaaaaaagagcccacatagccaagacaatcctaagcaaaaagaaaaaagctggaggcatcatgctacctgaattcaaactatactacaaggctacagtaaccaaaacagcatggttctggtaccaaaacagatatatagacgaatgggacaaaacagaggcctcagaaataacaccacacatgtacaaccatctgatctttgacaaacctgacaaaaacaagcaatggggaaaggattccctatttaatacatggtgttgggaaaactggctagccttacaccttatacaaaaattaactcaagatggattaaagacttaaatgttagacctaaaaccataaaaaccctagaagaaaacttaggcaataccattcaggacataggcaagggcaaagacttcacaactaaaacaccaaaagcaatgccaatgcaagccaaaactgacaaatgggatttaattaaactaaagagcttctgcacagcaaaagaaactatcatcagagtgaacaggcaacctacagaatgggagaaaatttttgcaatctctccatctgacaaagagctaatatccagaatctacaaaggacttaaacaaacttacaagaaaaaaacaaacaaccccatcaaaaagtgggcaaaggatatgaacagacacttctcaaaagaagacatttatgcagccaacaaacatgaaaaaaagctcatcatcactggtcattagagaaatgcaaatcaaaactgcaatgagataccatctcacaccagttagaatggtgatcattaaaaagtcaggaaacaacaggtgctggagaggatgtggggaaataggaacacatttgcactgttggtgggagtgtaaattagttcaaccattgtggaagacagtgtggcaattcctcaagaatctagatccagaaataccatttgatgcagcaatcccattactgggtatatactcaaaggattataaatcattctgctataaagacacatgaacatgtatgtttatttttggcactactcataatagcaaagacttggaaccaacccaaatgcctgtcaatgatagactggataaagaaaatgtggcacatatgcaccatggaattctatgcagccataaaaaggatgagttcatgtcctttgcagggacatggatgaagctggaaaccatcattctcagcaaactaacacaagaacagaaaaccaaatgctccatgttctcactcataagtgggagttgaacaatgagaacacacggacacagggagaggaacatcacacactgtggcctgtcatggggtcgggggctggggtagggatagcattaagacaaatgcctaatgtagatgacgggttgataggtgcagcaaacaaccatggcttgtgtatacctatgtaataaacctgtaagttctgcacatgtaccttcaaacttaaagtattaaaaaaatgcaaaggttatctctccaagttggagcccagagcaaaggtaaaggagaaagtatttaatgtccaggctgttaagtaactaaatgattttactgtatgtatttccactgcataaacaccaacatttaattaacccattacacagctcaggcacatctaactctagcttggactctggggccagaaggactgttcaaatcccagcttggccacttactgacagtgtgatctttggcagatgggcctaacaggggtgcatgttccataggaatgttgtgatgattaaaagcagatgaaattcacatggcaggcaggcgcccaccgccggcggtgatgcggctgtgaagccctagtcgctctcagcaaccagacaagtgccttgcccatcacagacaccaagggatgaatgaaagaaaaagactcagacgcttaaatcaaacagaagttcacatgatctcaaatgggagcgaagagaaggatttggagtctgtcctgtgcacaggacaaaggaaggcttgacatctttcccttccctacaagaggctcctcccctcaggtgcatcttctctgaaatctgaaaatgccgatgtgcatgctggcggtttcaagttcattagttccattctgaggctttatcagggcctcttctaccgctattccacttcctaaatgggaagtatcatatgctttctccctgcttccctccctcccctcccttcccttccctcagtcctttccctctgtcattttctgtttcacaattgaaaacagagctgtgtaaaataagtcatattcagatagaacccaattgggctgaatttgaccacatgtaattttgaagccagtgttttttttttttattattactttttttaaagacagggtcccactctgttacccagacaagagtgcagttggcctcatcatagctcgcagcagcctccacctcctgggctcaggcaatcctcctgcctcagcctcctgagtatctgggactacaggcatgcaccaccaggcccagctaagttttgtgttttttatagaaacaggctcttgctttgttgcccaggctggtctgaaactcctggctttagctgatcctcctgcctcggcctcccaaaattctgggattacaggcgtgagccactatgcctagcctactgcttttatctttaatagcaacatgtctgagcagtggaggaaggtaggactagaaagacttcccctcctcactgcaaaaggaaccaatgacaagggcaagtttacttgttttagttctgcagaggtatagcatttactcctgtctagtgcagagcacagagctctaaggtctgtgttcaaagaatcaagtcctacagaatgtgtgtgtgtgtgtattttaatatatctttatatataatatatattttataaatttttcttagatgtagtgaatatgagaatataagtccagaaaaaccctgtttataaaatttgctgtgtttcccagagactttcaagaatccaggccaaattggcttagggaaggagtcttcctgagagttacagaaggactctagaaatctctgttttggtgatgattgtgatgtgcaattgtagactttattttgcagtgccttggtaactagagatttcttctgcatagtcccatcttggttttgtctgtttccactgcatagaatttctggctactgctgaacatacacatgccaatcagttaggggaaaaatcacccattatattgtgagaaactaatgcagaagtagatttgcaactttgtcaagttgcgttttaatttcccttttttgaagagacagcctctcgctgtgtcgcccaggctggagtgtagtggtgctcagcctcaaactcctcagctcaagtgatcctcccaccttggcctcccaaagtgccgggactacgggtggagccaccacacccaatcttaatttccttcttcctggcagggtgaaaacatgcaaatcagtctggaattagttaaaaagtaaaagatatgggaaactctgcccgtctccctctcccgtctccctctccctctcccgtctccctcaccctctcccgtctccctctgcctctcccgtctccctctccctctcccgtctccctctccctctccctctcccgtctccctctccctctcccgtctccctctccctctcccgtctccctctccctctcccgtctccctctccctctcatgccgagccaaagctggacggtactgctgccatctcggctcactgcgacctccctgcctgattctcctgcctcagcctgccgagtgcctgcgattgcaggcgcgcgccgccacgcctgactggttttcgtttttttttggtggagatggggtttcgctgtgttggccgggctggtctccagctcctggccgcgagtgatccgccagcctcggcctcccgaggtgccgggattgcagatggagtctcgttcactcagtgctcaatggtgcccaggctggagtgcagtggcgtgatctcggctcgctgcagccacctcccagccgcctgccttggcctcccggagagccgagattgcagcctctgcccggccgccaccccgtctgggaagtgaggagcgtctctgcttggccacccatcgtctgggatatgaggagcccctctgcctggctgcccagtgtggaaagtgaggagcgtctctgcccggccgccatcccatctaggaggcgagaagcgcctcttccccgccgccatcccatctaggaagtgaggagcgtctctgcccggccgcccatcgtctgagatgtggggagcacctctgccccgccgccctgtctgggatgtgaggagcgcctctgctgggccgcaaccctgtctcggaggtgaggagtgtctctgcccggccgctccgtctgagaagtgaggaaaccctctgcctggcaaccgccccgtctgagaagtgaggagcccctccgtctggcaaccaccccgtctgggaagtgaggagcgtctccgcccggcagccaccccgtccgggagggaggtggggggggtcagccccccgcccggccagccgccccgtccgggaggtgaggggctcctctgcccggccgcccctactgggaagtgaggacccctctgcccggccagccgccccgtccgggagggaggtggggggggtcagccccccgcccggccagccgccccgtccgggagggaggtggggggatcagccccctgcctggccagccgccccgtccgggaggtgaggggcgcctctgcccggctgcccctactgggaagtgaggacccctctgcccggccagccgccccgtccgggagggaggtggggggaacagccccccgcccggccagccgccctatccaggaggtgaggggcgcctctgcccggccgcccctactgggaagtgaggagcccctctgcctggccagccgccccgtccgggagggcggagggggggtcagccccccgcccggccagccgccccatctgggaggtgaggggcacttctgccgggccgcccctactgggaagtgaggagcccctctgcccggccacgaccccgtctgggaggtgtgcccagcggctcattggggatgggccatgatgacaatggcggttttgtggaatagaaaggcgggaagggtggggaaaaaattgagaaatcggatggttgctgggtctgtgtggatagaagtagacatgggagacttttcattttgttctgtactaagaaaaattcttctgccttgggatcctgttgatctgtgaccttatccccaaccctgtgctctctgagacatgtgctgtgtccactcagggttagatggattaagggcggtgcaagatgtgctttgttgaacagatgcttgagggcagcatgctcgttgagagtcatcaccactccctaatcttaagtacccagggacacaaacgctgcggaaggccgcagggtcctctgcctaggaaaaccagagacctttgttcacttgtttatctgctgaccttccctccactattgtcctatgaccctgccaaatccccctctgcgagaaacacccaagaatgatcaataaaaaaaaaaaaaaaaagaattgaaaaaaaaaaaaaaaaaaaaaaaaaaaattcacatggcaaattgcatgagtgggacacctcactaagccttacctactttttgttatttactatttactctcaccactccaaatcttcaagccctatccagagtcaggtcacactcagaagacacctcaaaaaaccaggctacctctcccttctttgaaactcagttttggaatctttttggtatttatttgggtttccaaccttccagtaacactttctaacacctaaacataactctggagtttggcttttgatgacatcttctcttcccctatgttctaagcaactttcttttatttaagagtctcctctatttccctccaacttttcattcctggtcctctctttccctaattttctctctccaaggccagagattgaagaggaaattcccatcaagtttagaaaatgtgaaatgtggtcaggctgggggaaggagaaagggaagaaatcacatctttatgattcctttattttatctccacacacataaattcagcacttggtaagtaattccctaccctgtcctggtctgtaatttctcaaccttctttgaatcccctttgaacaatataagtatttccttccatgacccaccccaattttattcaaaacttcaaaataaatgggacatcatgactaaaaacatattaaaactatggtcacctgctggacccaacccacagattctggccaaacgatggatgaaagaacacactcaaacacagttatccagtgaaagagtgggctagtggaccaggccatgcacagaccccgaggagggtgctgtaaagagtcagaagccacagccctgaccagctggcactgcaggcctttatttagaacagatttaatgacagaggctttgagtcaacacacttggggataataaacatggtcgccttccccagagagagcagtcctgtgtgcggatgattaaaggccagtttctgagggataagtaaactaacttatccagatcagtttctttacatccccttgttatctaacccacgctcttaagagaattcaggtgccttcagctaaacccccttctgaaaccatgcaaacccctggccttccaagaaggtttgcatctttctacaatttttcccaccaccctgaccgatctcctacagtcaccttagactatgcctatccagactacacaagcaccctgagaaatgtgaaacctctcccttggccccctctccagtcccagggagttggcaatcactgcctgggtttaatggtcttcttcaacagaatgtgctctaaatttgtgagtttcctggccagagttggccctgtcggggtaagctcctaaatctggtgaccatttctatctgattctgtttggtttgtgtttcatccagaatagtaccttacataagcacttacatccgatttttgaaacagatttcttggcaaatattgggtatggttaagagaatacattcggtgtcatgccatgcacaagacagctacatttcctggcctctatggcaatcaggttgggaccaggttgacaaggttctggccatttgacagaggtggatgtgatatacgccacttacaaacctgttcccaaaatgtcccacactatgttccacactctttctttactagttgggcaatcagatagaaaagatctaggagagaacttcaagaaggctctggggagttatggagctacaagatagaaagagcctggatccctgagtcacagctaggaggagattgcccaagagagctgcccaactcatattcactgtgaggtgagggagaaatgaatccttgttgcattaagccacagagatttggggggttctttgctatagtagctagtgttaattaacctaatacatttttaaatttcttagaatataataatggctacataaatgttgatttttatagcttattgttctatccactaatatttattgtgtcttacaggtaatattgtatgtttcccacaacaccttaggtgggtgcccaggccttgctctctctcaccagaaggcctttatcgatgttgttttctctggcttacctgttccttcttcccctctccacatagtcaacactacttatcattaaggtcaaagctcaggcgtgctcctactcatcaaaaccctccctagctccctagactagatcagtgttccctattacatgatctcataaatccctaaacatctcctatggggtacttatgacagtttgtcattgcatgactatgtaattctttggtgagcatctctcttcctcaacatagaataagcaccaagactgcaggggccatcttatccgattcgctgtgatattccctgggcctagcccgatgcctggctacaagatgtgctcaaaacgtatttgactgtacgggtgtatctgcacaggatgggcctcacaggctttctgcctcttagtgaggtcaactgtcagtgttaaatctggtctttatcttcacaagtttagaaacttaatttttcatggaagcccagcacctggaacatgattcctgataactacacttaggggatatctacttcctgactgtgaggtccctgggaaagtaagttagtgagcattcagagcacatttgatgactaaagaaagaggatggttttgagaggaattcacttctcttaggctggaaaattaaccttgctttcttaaagagtgcatgtttcttctagacatagcttttttctcccaccattagatccattaaaatcatgcttagtaaggccgtggcatataataagagctcagtaaatatctgaatacatatctgtgggtctcactggttgaatgactgacaaatggtcttatgctttggctctccatttctagaccccatgtagtgattgccttttgttacagcatcacttgtccctggatttctaccatagaagtttgagaagaactagtgaatgtgagccagacctacaagatcataaattccttgcagttaagaatcatcatcaaagagaaaaagaaaatcattatcatcatcatcagagccaacacttttcatgtacttatccaaaccaggcactgtgctgagccctttacaactgtcatctcattaatccttataacaatcatgtgagtagtgtccctgtttatttttaatttatttttgctttttggtttgtttttagagacagtctcattctgtcacctaggctggagggcattgccacaatcacagcacattgcagcctcaaactcctgggctcaagtgatcatccggcctcaacccacaccccacccaagcaggactgtaggcctgagccatcatacccagctaattttttttgttttttgagacagggtctcactctgtcacccaggctggagtgcagtggtgtgatctcagctcactgcctcctggaactcccaggctcaggtgatcctcccacctcggacttccaggtagctaggactacaggtgcacaccaccacatctggctaattttttgtagagatggggttttgccatgttgccctggctggtctcaaattcctggactccagcaatctgcccacctcagcttcccaaagtgctgggattacaggcatgagtcaccgcacccagcccctcacagttaatttttaaatttagtagttctcttttacagatgaggaaatgaaactcagtcatgataaaggaacaggtgaaaggtcacccagctagtgagtggcagagacaagacttgaactcaagcctgtctcactatggagcctgtattctcatgcactgtgtatagtgcattccagactgtattcatcttggtatccctatagcacctgaaaatcagcattatactatgccttccaaacatgtgtatatagtcaattattggttgcaagcagcagaaaacaactctgattattgtaaacagaaaagagattacaaggccactttgaatttataagaagcaacaaacagattataaaaatgaagatagggacagggtgtacagtatagtgactatgactaataaaaatgtactgtatattttaaatttgccttcacgcacatgcacacatgtacacacagaaaggtaactatatgggcaaaaaaaaaaaaaaaaaaaaaagatacagaggcccaagaagcagaatacaagataatcatctttgagcaggaacaatcctaccaggatgccttggccaaatccttccagtgcacatggattctaactttccattcatctttgcctcacaccacacatttattccaaatataaagtctagggtgacagcatctgattggccagcccttcatttgcctttgtgctaactaaaagcgtgttggggaagaggttagtctctagaccttcctacttccctagagggaggcgtagcttgctgtgactgacgcagtgggaatttcccccagatagagggaaggcatagatgctaggctgccacaaacattgacaaatgtccaccacaacaggtgtgcattaactcaggcctaccacaatccctgaattgcaatttatgtcacattttagtccccttgctgatactagagaaaccccagaagcatgattacaagtcatcatttagcatagtttaagcacgtgattcattttcatttttattttagaaggtggcattttctgacccaccttggagatgcgccctttgaggagcctgcagcctcctgcacctgaagaaagtggcccactcatgaaaacgcccaggctcccagttggggagaaccatctccaccagagggggatccagatccagtggagaagaattttttttattgtttttagataaactgtcttcaaatagtgcagcacgggcacttcctgcctcgatggaaattcagcacacttcctgctgctcacctgccccatctgtgtttatcttctgcctcaatcatgtgaaggccaaatgggtggcatgagtgcaactgggccagctgtggctgggggcagcaacagctccatgttttgaggccagatggaggctgctttggtctaggaggtggaggggagccagtggctgcttcaggcctccctgtgtggagtgcttggagctggaagtagaagcagggcccaactgggggctccattggatgaagcacaccatcccatccaaaagcctgctcccaatgtcctcactgagctctctttgtttctttctgtttcttctatatgtatacatatcaaatatgtgtgtgtgtgtgtgtctatgtatgtgtgtgaaacagaaagaagcaaagagtcctttgcactttatcaaaggtactctactaattcctttacacttttatcaaagatattcacttgtcagggacactagagcagtgtccaggctgcatgtaacatcagctgggaagcttttataaattaaaacaactataaaatagttgcaggcattttcaagtttttattaagcctcataaaaacttgaaaatgtctataagacacctacactacaggtctccatggctctctgcaaaacatgaccaagctcaaaaagacacacaaggttagaagacaccacagatttggcaacagcccatgatccttgggtttatctcccctcagagtggctccttaaagtgacactggcacttttctgaaacgctttcctgcaggttcttgagcacactctaatggaagctctctctcagaattatgcacatgagagtgtcattgtagaatgctttttagcatatccaccacaggtataatgaaacacaggctacatactgataaaatggaaggaccaaatgaaacaagcctattcatacacatttctgtgtctctttgcatctgtggttttcagactttagtgtgcatcagaatcgcccagaggacttgttaaaacacagattgctaggccgcaccccagagtttcagattcagtaggtctgagatgaggccccaggagctgcagcaagtaaaacgggcagcaacagctactgcgtcacctgaggcccatttgcgacagtctctgctctgtgtgataaaaaagatcacattttcctttcctctaggtctgatgtgaggctggcttgttttacattgggcatctctgagaaagtatcaggaaaaaggcagacaaagcagaagtgcctgaaatgatatttattaatttggattctgagtagctaaattgaaacttgattgtgcccttacccctagctcctcctgggcctggagcaaggacaggctacgtctgaggcagcaggcattggaaggagtaggatcgggttagggctagttttagggcaaatgaggtacctccatccttaccgtccagctatgtagtaacaaattagcctcttctagatggtctgaagtctattatataaagtttggcttgtataagtgtttctaaaagtgttttaacatgaaaaattttaaacacatggaaacttacgaagaatagtacaatgaacacctatatatacccaggaacaaaattcaattattattaaaattttgcttcttgtttcttggctcactacaacctctgcatcccaggttcaagtgattcttgtgcctcgagcctcccgaatagctgagatcatgggcatgcaccaccacaaccctgctaatttttgtaattttttaatagagacagggtttctccatgttggctaagctggtctcaaacccctggcctcaaatgatccacccacctcagcctcccaaagtgctggggttacaggcgtgagccactgcgcctggcccatttgtttcatttatatatatgatctatattttttgctgacatcatctccaaaaaagtaaggacatctgcacagtcacaatgtcattatcacctaaacattaacagtattccccaatattgccttatatcatctcttccttttatccccaaaatgttttatggatattgtttctttgagtcacacacagaacctaggcaaggtcagggccagggtgatatgggttaaaaggactccagaaaactcagtaatcaagagtaataatattgtaatgcaatatttcaaaaagtccaattggctaactacagcccataggccagctgcgtgtttttgcaggaaaagttttatggggctgggattagcatgagataagtgaggcagggttgtacaaatgtaggctctcttttttttttttttttttttggaaacagagtgtcactttattgcccaggctgaagtgcagtggcatgatctcagctcactgcaatctccacctcctgagttcaagcgattctcctgcctcagcctcccgagtagcagggaatataaggcatgtgtcaccatgtccggctaatttttgtagttttagtagagatggagtttcactatgttggccaggctggtctcgaactcctgacctcaggagtgtacatgcactacacaacataggtccagacaagaaaaactaataactggcagaagtatggggtgaaaaaataaattaatatttctagatattgaaacacctctttcaaaaactatatttcacataggcaaaaagttaagcaaagatgaagaacatttgaataagcctgatctaataagcataaatagaattgatcactcataagaactacatttttttaagtacatgtgaaacattcacaaaaattgacctgggtgcagttgctcacgcctgtaatcccagcactttgggaggctgaggtgggtggatcaactgaggtcaggagttcgagaccagcctgaccaacatggtgaaatgccgcctctactaaaaatacaaaattagttgggcatggtggtgcatgcctgtaatcccagctacttgggaggttgaggcagaagaatcgcttgaacctgggaggcggaggttgtagtgagctgagatggtgccattgcagtcccacttgggcaacaagcaaaactctgtctcaaaaattaataataataaaattgacctgaactagacaacagagaaaacctcaaggagatccaaaaagttcatatcatgtagactttctctaactataatgtaataaaattaaaaatgaattttgaaaattccctttaaaagttccatgtaattgtaaactaaaacgtgtgtctaaaaaaagtttacataaagaagaaatcataaggaaaattattaaatatttagaactaaacaaaaatgaaagcactttgtgtctttctaatgctgtaattagaagggaatttgtaggtatagatacattaatttaaaaactagaaagcttttccttttctttaatgagataagtgtttaactgaaaatttagaaacaaaacaatagagttagcctaaagaaacaagatggaagggaatgataatcaataaaatagagaacaaaatattataaagaagattgataaaacaaaaaataattctccaaaagactgatcatggggaggagagtgagagagactaaggaaattcaaagtactatgacacagaatgaaaaggagatagtatacagtcaaaaaggggatttaaaatttaagaaaaatatactataaactatatgccagtaaaatttaaaatctagatgacgataaattgctagaagggtataaaatgccaaaatttgcataagaagaaacataaaatttgaatattgaaataaaatgaaagaaaataaataggtaggctgggtgcagtggttcacacttgtaatcccagaacttggggaggccaaggtgggcagattgcttgagcctagcagttcaagaccagcctggacaatatagtgaaaccccatctctatcaaaaaatacaaaaattagctgggtgcagtggtgcacacctgtagttccagctactagggaggctgaggcgggaggatcccttgaacctgagaggcagagattgcggtgagccaagattgggtcactgcactccagcctgggcgacgacagagtgagatgaccctgcctcaaaaacaaacaaacaaaaacaaaacaaaagaccaggtgtggtggctcatgcctgtgatcccggcattttgggaggccaaggcaggtaaaccacttgagctcaggagttcgagaccaacctgggcaacatagtaagatccccatctctacaaaaaatacaaaaattagctggatgtcatggcatgcacctgtggtcccagctatttgggaggctgaggcgggaggatcacttgagcccagaagacagagattgctttgagctgagatcacactgctgcatgccagcctgggcaacagagcaagacgctgtctcaaaaagaaaaaaacagaaagaaagaagaaaaaaaagaaaaggaaagagaaaagaaaaaggaaaggagggagggagagagagagaaagaaagaaaagaaagaaaaagaaaaaaggaaggaaaagaaaagaaagagagggaagaaagaaagagaaagaaaaagaaagagaaggaaggaaggaaggaaagggaaattggcagtcaagatatcctccaccatccctcaaattctctggacttgataattccataggtaagtttcaccacacttgtgaggaataaaaccccatatcttgtgcatgtttttccagaaaataaaaatagaaagttacccaaatcattctgtggaactggtataaacttgattccaaagtcatataaaacagcaaaagaaaataaaattataggctcattttacttatcagcaaagataggaaaattcaaaataaaatattagtaaagcaaatacaaaagaggacaaaaagtagggcttatcaaagtaatttgacattagaatattaatcaatataaaagaaaaacatagttatctcagtaaatgcaaaaaaagcatttggcaaaggtaaacagctctttatggtttttttaaaaaactatcaggaagttaggaataggtccatgtgtggtggctcacgcctgtaattccagcactctgggaggccgaggtgggtggatcacttgaggccaggagttcaagaccagcctggccaacatagtgaaaccccatctctaccaaaaatacaaaaattagctgggtatgctggtgggcacaggtaatcccagctacttggaggctgaggtgggaggatcacttgaacccagaggtggaggaggctgcagttagctgagattgtgccactgcactccagcctgggtgatagagtgagactccacctcaaaaaaaaaaagaaaagttaggaatagaatatcctccttaacttgacatctactaaaaacctgcagagccataaaaaatgatgagttcatgtcctctgtagggacatggatgaaattggaaattatcattctcagtaaactatctcaaggacaaaaaaccaaacaccgcatgttctcactcatagatgggaattgaacaatgagaacacatggacgcaggaaggggaacatcacactctgggaactgttgtggggtggggggaggggggagggatagcattaggagatatacctaatgctaaatgacgagttaatgggtgcagcacaccagcatggcacatgtatacatatgtaactaacctgcacattgtgcacatgtaccctaaaacttaaagtataataataataataaaataataataataatcagaattagagtaattgggatatccatctcttcaaacatttgtcttttctttgtgctgggaatattacacatcttctcttccagctattgtgaagaataaaataaattatttgtaactgtaatatttatattataaatatactttactattgaatactagaacttagttcctctacagaacggcgtttttgtaccgcttcaccaagttagttctttcaccctcattccccttccagactctggtaaccaccattctactctctacctccataaaatgcactttaaaaaaaaaaaaaaaactgcagaaagacattatggttagctgaaaaatttcagattcattttgctttaaaatggggagaaaagataaggatacccattgtcaaagttacttttaattgtagtattggaggtatttgccatcattataaggcaagaaaaataaattagaggtggaaggattatatagagaagcaaaaatgtacgaataagaaagttccccaaggttgtcatgcaaataatcacttacaaaattaataatgctgtattagtcaggggtctctcaagaaacagaattagtaggatacattcattcattcatttattataagaaataataaaggatttattagaaggaattgtcttatgtgattatggaggctggcaaatccaaatctgtccaagtctgagtcaatatcccagtttaagtgtgaagtcagaaagctcctgtagaaccaggaagagccaatgactcatttcaaaagccatcaggcaggagaattctactcggcggatggtcagccttttcttctggtcaggccttcaactgattggatgaggcccatccacattatagagggcaatctgcttgcatcagtctacaatttaaatgttaagctcatccaaaaaacagcctcacagaaacacctagaataatgtgtgaccaaatacctaggcaccccatggcccagtcaagctgacacataaatctaaccaatacagtgttcctcctcattaaggtaaaatattaaaaactgtctccagtgaatcatgcctctctggatccatccctttgcaatgtgcctttgctctcctgcccaccatcaggccctcagacatgtgaatgaagccatctggaagcctctaagacagtccagtcaccccactgatgtcatgtggagcacttcctgtggagcgctgcctgaaactctgacccctgggttcgtaagtaacaacatggttgtatttattcgctgagtttagggagtggtttattatgcagccatacataagtgacataactgatactactaatacaataagtagtgagaaaatatgaattaagatacatcacagtagcaccagaaattattgtgtatcctggaattaacctaacacaactgcacaaaatctttatgaggaaaaatataaaactcctttaaaggatgttttaaaagactcagataatgaaagacatgccttttttctttttctttttcttttttttctgtgacagggtctcactctgtcacccaagctggggtgcagtggcgtaatcttagcttactgcaacctccgcctctcagggtcaagcaatcctcccacctcagccttccaagtagccaggactacaggttcacaccaccacacttggctaatttttgtatttttggtagagatggggttttaccatgtggcccaggctgccttgagcttctgagctccagcaatctgcccacctcagcctcccaaagtgccgggcttacaggcatgagccactgtgcctggctttattgaagtgtacctgacctacaattgatagtacattttaaagtgaacaatttaggttttgacatatgtatacacctgtgcaatcaccacccctaaaaatggtgaacatatatccatggtgaacatatatccatcattcccaaaacttttctcatgtctttttgcaaccctttcctctcacctctccctgaaccctttcccattcccaagcagccattaaccattttttgtcactatagattaattttcattactagaattttatataaatagaattatccagcaattttattgtctggcttctttaactcagcataattattttgaggttcatccctggggttgtgtgtatcagtaatgtattcctctttattgccaagtagtgttattccatggtttgtatgtaccataatttgtttactcattcacccattgatgcacatttaggttgtctccagttttgaactaatacaaataaagctgacatgaatattcatatccaagtctttatattgacttatactttcatatctcttggataaatactcaggagtggaatggctgggtctttcaggaggtattccagaagaagggattgttaacacaggagaagacagctccatgcatgttatttcccccgaagatctcccagtgggacaagacgtggaggtggaagacagtgatattagtgatattgatgatcctgatgatttgtaggcccaggctaatgtgtgtgtttgtgtcttagtttgggacaaaaaagtttaaaaagtaaaaaaaaaacaaaaactttttaatagaaaaatgcttatagaataaggatatgaagaaaaaattgttctgtgcagctatacaatgtgtgttatacattaagtgttattaaagagtcagaagttttaaaatatcaaaaagtttatgaaattaaaaagttacaataagctaaggttaatttattattgaagaaagaaaaatattttaaaaataaatttagtgtagcctaagtgtacagtgtttacaaagtaaacagtagttacagtaatgtcctaggccttcacagtgactcaccctcactcactgactcactcagagcaacttccagtcctgcaagctccattaacggtaaatgccctatccaggtgtaccattttctgttttatacatatttttactatgccacctctatgtttagatgcacaaatacttcccgttgtgttacaattgcctaaaatattcaggacagtaacatgctgtacaagtttgtagcctatccaataggctatcccacatatcctaggtgtatagtaggttataccgtctagatttgtatagtacactctacgatgtctgcacaatgatagaatcatctgacaatacatttctcagaacatatctctgttgctaagtggcacatgactgcacttatttgccatctacatgccttctttggtgaaatatctattcaaatattttgcccatctaaaaaagttgagttgcttcttattattgagttttgagagtgctgagtatattctggatacaagtcctttattaagtatatgatttgcaaatatttacttcagtctctgggctgtctttttattgtcttaccaagatgtttcaaagagcagagattcttaattttgctaaagtccagtttatcaatttctccttttatggattatgcttttggtgtagctaagaaatcattgcctaatacaaggtcacaaagattttcttctagaaatgttcatgttttaggttttacctttaggtctgtgatacatctgaattaatttttgaatattttatgagataagaatcaaaatctattgttttgcctatggatatccagttattctagtaccgtttatttaaaagactgtcctttctccactgagttgtctttgcacttttaataaaaaccagttgtccatgtaagtgcaggtctatttctggactctgtttgagtccattgatctatttttttcatgtcaatgttctcagcttccaccttaagattcttaaacaaaaaagaagagtaaattaaatctaaagtaatcagaagaaaggaaatagcaaagattagagtggaaatcaacacactagaaaacagaaaaataatagaaaaaaattcagtggaacaaaaagctctttctttgagaagatcaataagattgaaaacttctagccacactaatcaggaaagaaagggaggataaaaattagcaatatcaggaatgagacagccaacatccccacgggctctcagatattagaggatgataagggaattttatgaacaattttatgacaattttttttgagataggatctcactctgtcacccaagcatataatgcagtggcatgatcagagctcactgcagcctcaaactcctagactcaagcgatcctcctaccccagacccctgagtagctgggactacaggcatgtacgacaacaaccagctaatttaaaaaattgtttttgtagagacagggtcttgcaatgttgctcaggctggtctcaaactccaaacctcaggcaatctcccatcagcccctcagtgggctgggattacagatgtgagccaccacccctggccttagggaaacttatatgacaacttagatgaaaaggacaaattttttgaaagacaaactaccaaaactcattcaacaagaaatagatggccaggcatggtggcttatgcctgtaaaatggtacacctgtatacggcatttacccttaatggagcttgcaggactggaagtaatcccagtactctgggaggccaaggcaagtggatcacctgaggtcaggaattcgagaccagcctgaccaacatggtgaaaccctgtctctactaaaaataaaaaaaaaaattagttgggcatggtggcgggtgcccgtaatcccagatacttgaacggctgaggcaggagaattgcttgaacctgggaggtggaggttgtggtgagcagagatcgtgccactgcagtccagcctaggagacagagcaaaactctgtctcaaaaaaaaaaaaaaaaaaaaaaaaaaaggaaaagaaaaaaatagataatctgagtagtcttgtatctattaaagaaatagacaattggccaggcgcggtggctcacgcctgtaatcccagcactttgggaggccgaggcgggcggatcacgaggtcaggagatcgagaccatcctggctaacacagtgaaaccccgtctctactaaaaatacaaaaaattagccaggcgaggtagcgggcgcctgtagtcccagctactcaggaggctgaggcaggagaatggtgtgaaccccggggggcggagcctgcagtgagccgagattgtgccactgcactccagcctgggcgacagcaagactccgtctcaaaaaaaaaaaaaaagaaaaaagaaatagaatctgaagttcaaaatccttcccacagagaaaacttcaggcccaggtagcttctctggtgaattccatcacatttaaggaataactaataccaattctgcacaaactctttcagaaaattgaagaggagttaacactccccaactcattctatgaggccaacattatactgttattaaattcagacaaagactttgcaaggaaaaagaaaagaaagaaacaatcccaaaccaaaaagttacagaccaatacccctcatgacaaatatctctcttaaaatgttagcaacatgttcatggataagatgaccttaacaattctaagatattaattcgctcccaaattcatctataaatttatgcaagatgattcaaaattccaacaggactttttcaagtaaaaattttaatgaagtatatacatacagaaagctacaccaattattaagtacacagcacaatagatttttgcaaaatgaataactctatataaacatgatccagattaaaaaaaaaaaactaaagtattatctgcacccccaccctggaaactagagaatagccttgcctattttgaactctatataaacggagcatgggctgggttccgtggctcacacctgtaatcccaacactttaggaagcctagatgggcagatcgtttgagcccaggaattcaagactagcctgggcaacatggtgaaagcccatctctacaaaaaatacaaaaaaattagctgggtgtggtggcacatacctgtagtcccagctactcaggaggctgaggcaggcagatctatcgagcccaggaagtcaaggctataatgagctatgattgtgccactgcactccagtctgggcaacagagtgaaaccttgtcaaaaaaaaaaaaaaaaaaggaatatggatggtgtataaaaggaaagtacgtaattgaataaaacaagagcagttccttggtgatgataacgtaccatgaattgaggggtatgatgaattcaaccctctccacctgagagatctctaaaaacctacaaaacaaactagcagaaaacataaagccttctggtgagcctaccttatcaagtcaagacaaatctgaattccagtggtagacacaatttaggttcttcctgcttccatctctccacccccacgagctccaaatagaatgaagttcttttgggattaataacatcctagactgggtgggtgttaggcgctcctcattcttgtagttgggctcttctcatcgctcagtttcttcatctgctaaatgggtttacttgtcctatctaattcacaagcatttgaggaggaagatcaaaatagggtaagatatctgaaaacaatttgtgaactataaagcattgttaaaataaaagccatcataattattattttaaaagtttcccatggcacacatttacctatgtaacaaacttgcacatcctgcacatgtacccctgaacttaaaataaaagtcaaaggaaaaaaaaagtttcaagcaattccagcctggattaaaaaacaaaaaaaaacagaaaaactttattttataatgtgaaatattttaggacaatataagtattttgatttctggggggaaataggtccccaaattgaactcttaagtgccatggtttgtgtatattgcttatttctttatgtgttgaacttcagattacgtgtaataaacagtctgtggtgcaatgcaattgattttcctgcattgaaagttgaattaaatgtgcattactctggggctggtcaccatgggggaagcttaaaaggtctgatggaaaatatatgaagaccattaaggcttgctaggccccatctcccttggttagaaacatgaacactagtagcatcaaattcatctcctttcagctctgtaatccaagagggaacagagttcctctcttccagcttcagggaaacacttcagggagaggctgattggcctagcccgggtctcattccaagaagtgtgtccagtggatgaggccagttatcaaaaggggtgggggaaggatgctgagcagattaaacagtaacatccacctcctacattttctgaaatgttgatacattcactcaagttggggagtttctcctgcttctccagggtggtcgtctttgatttgcagcgtcttttcctacgtttctcacgtgggaggaagccccgtgggatggatctgctgcctggttcagcgagaaggctttgcggtgcaagcctcctgcgtgctgggtcggcccgcccccggctatcgaagacagaagaggagaagggctctgtcagggttctcccagcactaattccagaaaaattggaatagtagcctttacagtgtctctgttaggtttccgtttgctacggtaacagaaatatagaggatttattggctcccattgcttaaaatgtgggtcgctggtgggggtgggggatgggatgtggggcaatcagggctcccgctctggttcttgggactccccaggctcatctttcccctgtgctggcagcaaggtggctgccacaattctaggcctcacctgacaacatgcccaggaagacagcctcttccggcagcgatctcttcagcaccagggtgtaatgtcccagaagctgccagcagacttctcctcacatctcagtgactccaacccctttgtgaacccatccctgtgtccagggagacgtcatgcgtgaatccgctcaggcctggattcctgaaacaatcaatggttagggatagaaatccgcttaggccaattggaccaatccctggtgctggcaatgaggtcagtcttgaagcacatgggttacgtgagggaaggcaggaatctgaatgaaagctgggatactgtagggcagaaggaaatgggtgctgggtaggaaacaccttaacgagcatcctctgcctcctttccgtgtctgatccaagtccctgccatcccaaactccgttggaaattcccccatgagaatccgggaggggagataaactagatgttcacgctcaccttgccattttatgcccaaacccttacagatcacccaattcaggcccctcatcttacagataatgaggctcagagaggaaaatgactgcccaaggtcacgctgtggctacagttggctgtaaagtcattcaaaccttcccagttccttttctgagacccgtctgtgatgggtaattttatgtgttaatttggctaggccacgatacccagatatttgatcaaacattattttagatgtttctgtgaaggtattttttcgatgagattagcatttaaatcaatagactttgagtaaagcagatgaccttccacaacgtaggtgggcctcaaccaaccagttgaaggccttaataggaaaatgattacctgcccagaagaagagggaatcctgtgagtggactgcctttgggctcagctgcacctcttccgtgggtctccagcctgcctgctgaccctgcagattttggactttgccagccttcacaatggcatgagccaattttaaaaagtaaatccctctccctgtgcatatacatcccattggttctgtttctccagagaactctgacatccctaaaggctcaacctattatttatcctgactttgggcctacacctatgtttaaaaaagtaatattctaaaagagtggctgctcagcaatgggtataggattattgaataactagttttcagttagtgatgagctggtggagtgtatagagactaatgccagggttctcacaactgtagcaataatgtaactgaagaaaagaggcttaccctgttgatgttcaacatcagcaaagatccttttctccctgctgtagctctttctgcttgagacaaagtgtccatgttatcgggatctgctatgcgccatcaggctccctttagttgccctttgggctgcccacatccatttccccttctcaatagccaaaattccctttggggcattacccttccccaatgtggatggctaattgtgggcagtgctcccactagggatgctcaaggggccagacctgtttctcctggctcccatccagcccgagtgtgagcatgtgacttcaacccagccaatcatggactctctcctgggactttaaatcaagtgacatgagaataagagggtgtattactccgttctcatgctgctatgaggaaatacctgagactgagcaatttgtaagggaaacaggtttaattgactcagttctgcagggctggggggcctcaggaaatttacaatcatggcagaaggggaagcaaacatgtcgttcttcacatggcggcagcaagaagctcagagcaaagacgggggaagccccttataaaaccatcaaatcccgtgagaactcactcactatcacaagaacaacatggaggtaaccacccccatgattcaagtacctcccacggggtccctgtggagattctagatgaaatttgggtggggacacagtcgaaccatatcagaggagaaggttggtgccatgcattgcagaagaggcaggagaggcatcaacatttctacaggctcctctggttatgagactatttatggactttctgtgaactctgtccagcttcttggccttccagtgtgctcgtggttctggccatttccaagcctatcaggctcctgtcaattttgcaagcccctgtgagtctttgctttgattatccagaattggcatctaaccagcaaccaagtcccccgactgatacagaccgttgagtactgtctccagctctgctttaacttagtgatgtcatttcacttccccaagcctcagcttcctcatatgtaaaattagggaatgagcctagatctgtgttctgcaaatatgtttcagccacaggaaatttcatgcaaacaaattttccttataggagcagataaatcataaaactggtcgacgcagtgctgctctggttaaagagagtcctgtcctcttggcactttctcagtagtgccctgctgtgactcctgcagggttccatagagcacgctggactagacaatctctaataccataaagggacaggggtgtactctctctccctcatggcaatgaaaaatagtctgggttgatttaattaactcagggaggcgtcatatccacagtttcttattgacaaaaacttgtttcttctcttcttgaaggaaatgtgcttagcaaatgtctgtgatatgtttaaacacacacacacacacaaccaatttagctgccaagtttttttttcttttcttttcttttctttgagacagagtctcgctctgttgcctaggctggagtgcagtggtgcgatctcggctcactgcaatctccacctccgaggttcaagtgactcttctgcctcagcctcccgagtagctgggattacaggcactcaccaccacgcccggctaatttttgtatttttagtagagacagagtttcaccatgttggccaggctggtctcaaagtcctgacctcaggtgatctgcccaccccagcttaccaaaatgctgggattacaggcatgagccactgcacccagacagctgccaagttttaagagcactttttatcatggggaaggcacagcaaaactacaaaaagcaaacaacaacaacaaaatcttgagtggggatgttttaaaccatttaaagtgtctctttttaaaattttttattttttaattaattaattaattttgaggctgtgtatgagactggctaatttttgtatttttagtagaggtggggttttgccatgttgcccaggctggtctcaaactcctgggctcaagggatccacccgcctcagcctcccaaagtgctgggattacaggcatgagccactgtgcctggcccagacacactttttctcacaaaaaaagtgctgacttatgcatttatcatggagaaatactcaattctatatctcaaagacccaataaaataatctaaaatggacaagactctattcacaagtgccttaaagagacactttagactaggcacaatggctcacatctgtaatcccagcactttggaaagctgaggtgggtggatcgcttgagcccaggagtttgagaccaacctgggcaacatggtgaaacccatctctacaaaaaatacaaaaaaatagccaggtgtggcggtgcctgtggtcccagctacttgggaggctgaggtgggaggactgcttgagtctgggaggttgaggccacagtgagccaagatcactccactgcactccagcctgggcaacagagtaaaaccctgtctgaaattaaaaaaaaaaaaatctgccataggcctggtgcggtggctcacacacttataatcccagtgctttgggaggctgaggcaggaggcagcaggaggatcacttgagatcaggagttcaagatcagcttgagcaacatagcaatattctgtctctacaagaaattaaaagaaaaaaattagctagacatggtggcatgtgcctatatatagttccagctacccaggaggctgaggtgggaggatcacttcgaggctggagtaagctgttattgcaccactgcactccagcttgggcaatagaatgagacccagtatccaaaaaaagaaaaaaaatctggtgtatatttaattccatgaagaaatcaaacattatccctccctttggcctgtagcaccaggtactttgcttaggattttcacacacacaatctcatgtattctcaaacaactttctggaaaagtatcatttatgattcctgttttattggtgaggacactgaagctcagagagattaagtcatttacctaagctcacatagatagtaagcagccactaactgcatggctgcaaagcttatgttctttcaaatataatactctactcctttcgttaacactatgcatttggagatattaaagtgtagaataatttgactacatagttcagtggtctttcagctttctcttctagatacagcctcaatagggagacccaaaactcccagctgaagaagcatcagagacctctgggtgcctcccttgggttccatgtgtctctgcaggaacactggtagagttagttcttgaaaggaacagtcctcttaaccctggggagtcttatttcctatggccagttgaagtttcctctaggaaggcaagctcattttaacaaactacaatcaggaataaatatttacaactaaaaaaaagggttttgtgaaaatgaattctccgactctcttctttgttactctacagacatcatcagtcactgaagataatgacggagttatgggattaggggatatgggatacgggatataaaggtaactatgaccttgctcaaataattctaattttgactcttggttaccactttgtccttgtcagctgttcttatttctaaaaatgatggtactctaaagataatccaaagagtatttattcattccaatgaagttaatcaacatttgcatatgtggtttactgggcaataaatcatttctaggtactggtcctgaatatgccacttcataagtaactgtgtactcttgggtaggtcacataagcccattgaatcttattttcttcatctctgaaatgagagatttagatgaggcattctgtaaactttaagattcttattttgctggttactttcaaggacctgggagctatgcaatcccaaatgtgtccagcagaggtcaggagatgtcactaaaagctctgagggctactttaatcccagttagctttgtaaatagttttatgatagtccctactctctgtgttacttacctgatttttttaaggttgggcaggcatttttcttgaaaaattaaagtagggatgcattgtgtgctttaggcctctttctcaaatgtaaaccatttctcccctggccaatgcctagtgagcaaaggtaaattgcccaacagaaggtgatacgtgggaacagtttaacctttggtaaatgtaagcaagtatggatgctatggcaaattccatttcgtcaaaactttctctttatgacaaaggatttctaagctctagctagtgatctaatattttgaaaaaattcatgatcacaccactgcaccagcctgcgtgacagagtgagactctgtctcaaaaaaaagaaaagaaacatatttatccagcaaaattatcgtcataatatgggtttcaatcaatatttctctttttctctctcttctgggtttcatcagaaaaattatcttggaaatataccattgcagagatagagactcttaataaatatttaaatattataagcattggtttatttaggcagaaacaggaggactgatttaaatgtgggttgaatccaaagaattgggaatcacaggaagaccctgcagcaaggtcaagcccgtcacaaagagctgtttaaagaaaatgtagtagagacagtctggaagttaaagttgactctgggtaagacccccatttaaaccttggtcaagttatttggtaaagtttcttaactttcctggagataaactcccccatttccttatctatatagtgaagacagtggtaaaacctcataagatttgtgtggggattaaatgagctaatacacatatataaagagtttaggaaaacactcgccacacattaaatgagcaataagtgagagctattgctgtcatacattttattagagaggagtgtttttagaaaaagcaaatggggaacaaaatcactatgtctttttctaaatctctttcatgactatctcagactaggtttgatgattctgtagtgtgtttcagccactggagctgagagaccccggcccggccacctggccatgcagacttgactggcaccatcattcccagctcacagcagcagcagaggcagctggatgcccattcctgccagccaatccttatccgactgccggcccgtcagccagagtcagaggctgccttccccatggagcagggactgtcggtggccttccccctctctcagccccacgtggagcctaggctggtgctgagttgcctgctccctgcttggaggtcaacttccatccagtgcttcatctttggcctctgaggcttttctgtttttcagcactcaggccaggtgagggtggctcatgcctgtaatttcagcactttgggaggctgaggctggtggatcacttgagcccaggagttcaagaccagcctgggaaacatggcaaaaccccgtctctacaaacaataaaaaaattagctcagtgtggtggcacacacctgtagtcccagctacttgggaggctgagatgggaggattttgggagcccagggaggtcgaggttgcagtgagctgagatcgcaccactgcactccagcctgagcaatagagtgaaactgccttaaaaaagaaagaaagaaagaaagaaagaaagaaagaaagaaagaaagaaagaaaagaaaagaaaaaaagaaaattagcacgtggtttactcattgtcattacttcttcccctgctctggcaggcgcctctaggacaggtctgcactgatctctcccaccatcgctaacccacggtaggatggactgggctctgagaaagctgggaacagtgggccaagcagggcagggagggctatgtgcttcctgcaggagagagagctgggtcgtgctgcgctctgatgatgaggggtgtgagctgggtggcaggaggcatgggccaggtgggatggctccctcgaaggttggagaagggttggcaggggggcaaatgaacagaacattccagatcagctgtggcacccatcacccaccatgggctgtccagcagggtgggggccagagcaggattgctacagcctgctcacatccttgagacctttctgaagacccaggccagtcgtcgagggacctcccaatcactcacgttcaaaaccaaagattaaaagggagatggctgtctccttacaccgaccatagctccaaactttctgaaaaaggcttaaactcttaaggtttgtgcttactcaaatggaaagaaaatgggaggaagtgtcaattcaaagagaaactttctgcttccttctaaagatgactgcagcctaattctggctctgacactgtcttgctcagatccagccaagctcctggctcctccaggccttgcttttggtgcctgtaaggcagctctggagtaatgggggcaagccccacctgtgaggagtgggggaaggcgtgagtgtgatttgtgattgctgatacttgatgcccacatacctcactctcaacatgtgttactatcagtgtaatttaagatatttttataaaaccaaaaaaaaaaatctagtgtcttaccttgttggaaatcccctttgggaaagtgctaatactaactattgaacatgtatccattgcatttataattatcctgataataactgccatttatttagaaaaagtatatagaaagccatggtgcagtaacaccattcttcccattttacagacagggacactgagccttagggagatgaagcaattctgcctaaatgcaggccgctaggcatgcatgagctcagagctggcactcttaaacccttctgcgtgtctccatgcacagtgagttcctgctcggcccaccctcagggctctgcggacaggcctgcctcaggacctttgcaggtgctgctttctccctctgggattcctctcccctccctcccgccccctgcccttccttcagacttctgccccatgcccgctattactgagcctctccctcccatatgaacgggtccacctcttcgccctttccctttcttgtttgtcttcctcccttcctcgtttgatcattctctgtctgcttcccccactagaataaagacctgtggggtctttgttttgtgcatggctgtatctttaggatctaggagaaggtgctccctcactattaattcaacaaaccagtgaatgaatgagtggccgccaggattagcggggctggtgggcagagcagaagcagtctggatgccgagatttgagggaaagctccctccaagccctcaggactcactgtagggttaactcactgtagggttaacagggcccagctctggcagagcacagttcaacagccaggaatgagctcagctcccgtccccactccccccttcatcagaagactgagcagctttttccctctgccaggcttccagcaatacctccccttggggtcttttctgcttattctcccttgggaggtactgtgggagtccagggattggggtggggtgcaagcgtgagggtctctggggaagggagactgtaaacacttccattttagcactgaaatccctgaagtctcttccctctggctggttggttcagccagaataaactttcttttggggtgagcagcttggctggcttttcaagactcagttcagacatctttgccgcccgtcttccaggttagtgccctctttgctgtcctcaggatggtctcagccctctctctgcttctcacagcagcgttgcctctgtctgcttctcagagaacactcacggtctggggtcgtgcctttcttcctctgggccccaggcccagaatggcaggggctcaaatcaatgtttgttgagtaaatgaagtgggatggggaggcgaccgatgttaccatctgagagccagcactgtgcatcatcaatgtttgcatgccttctccagctacaagtgccagggtcagccgcgaatccagaggggaccacattttatgtaggccataggactgactcaagacaaataatgctttgccctgcaaaatcagtgctgttgggccaggagtggtggctcacacctgtaatcccaacacttttggaggacgagatgggtggaacacctgaggtcaggagtcagagaccagcctggccaacatggtgaagctccatctctaactataaatacaaaaaaaaattagctgggcgtggtggtgtgtgcctgtaatcccagctactaaggggggctgaggcaggagaattgcttgaacctgggaggcagaggttgcagtgagccaagatcgcaccactgcactccagcctgggcaacgagaccccgtctcagaaaaaaaggaaaaaaaagaaaagaaaaaccagtgttgctggtagcaggctgccccacggttagtccctatccagctcagagaatgaagacaccagcatcaggggcatctccctcactcctcccttccctcaagctccaacagcttcttgcatgcatcctcccactgactgcagagtggagggtggggagtgggggcagttctcatttacagggggaaagaaatcctgggtgggggtgagaaaggggaagagcagtaggggaagccctgagggttgggtgagcacccctggaagcccagaaacctcattaccttccattctgactcatctgtcttctaattctttctagcttcttggcaaggacagaggaccctgctgagagggcttcaggaatggccaaagactgagacggtgcagcctcagccacgcccagaaagaacttggataagtctgtcttgctgtttttccagtttttgtttgcacctcacaggaagaactggtccgccttcattcctagccccaccaaactgacaggttagactgactcagggaccatcccctttgtcaggcagttccctcacttgctggactgaccgtggttctgcagtgtggttggggcccctgcataacactttagccaacaactacattagagaactctttgtctagactaaagccacatttcccaaagtcgtcagattaaagacatcacctggaagttctgattgggtcggtctggggatgccctgaaatcgacttctgaagcgcgccagatgatttataaaatagctcagtaaaaaccaagctcagccgggcacagtggctcacgcctgtaatcccagcactttcaggggccaaggtggctgggtcacttaggcccaggagttcaagaccagcctgaccaacatggtgaaaccccgtctctactaaaaatacaaaaattagccagacatggtggcacatgcctgtaatcccagctactcaggaggctgaggcaggagaatcagttgaacctgtgaggcagaggttgcagtgaactgagaccgtgccattgcactccagcctgggcaacaagagcaaaattctatctcaataaataaataaataaataaataaataaataaataaataaatataccaacctcatagaaagtgatagaaaatgtgaaaaaaacaaacaaacctcattagcgcctggccccttcccacctgtcaagcctaattccctgcacatgcgccctgagcttcctcctgcagttcgctctgcctggaaggtcctttctctcctttgcctgtctggggagctctgagtctgagtttttagcctgggaaggctttctccattacattcttgaggcctctcacagagttaggagagtcctctgctcccatagctctgtgggtatttcccatctggagcctgcagcaagctggaatgagaggtagtagtaagaaaccagccctctttatgagtaaacgtgtatttggtaactgatacagctgaagagctggtcaagtcttgctttcctcggaacaatgctgctgatttgtacagttgatcactctcaccagccccagattatttcaatggctccacattgtgcctgggattgagtccaagattcaagtgcctagcatgctgcaagagccctaaatgacctatgggttcctccagcctcatctccacccatcccacccctacccaccttgcatttcctcacaagggccacactctcgcacctcccaccttcattcatgatgttccccctgcttggaatactttcttctcatgtcctaccctgcttcatctgactcctactcatctgtcagaagtcacctgctctgggaagccttcccaggttaatgagaggtgagtcaacttcccccagcaagatggagaaatcaggatgcccctaaatagggggttggataaatccaggattctacctccacaaaatgaaataaaaatagagatgtgaattttcttatttctgtattaggcagtttttaaaatactgttgtgttcatggcaatatattcaagaatgtaaagtgaagagtaagtccctcctcctggtttcagtcttccctgaggcactcactgttgtcagtttcttgggtgggtcttacagacatgttctacccctaaacgggtatacacgtatgtcaaggtgagagaggggtaaagatgggggatacaaaatgtatttaagtcatggaccctgcacctgagaaactcacaacttcttgggaaggttaagtcagccctactccatgagttagagtattaaatggcatgtgggaacctgaatgaggtcactcactcaaggccactcacagccactcagagccaggattcaagccccaaagagattgaatgggcttgttctataaaccacccacctgccataagtaaaagggacacctttcataagtggtatcaagacagaattcctaacccccagtccccaggtatagttcgaatgcacattattgtaatccctctattgcaaagtcctggttcttggacttttaaagctgggacatagctgagtctggggctggaaaccaggactggcaggtgcaataaaagtaatagtccatcaagctttgttgcttgaactatggttaccataagtaattacaggaaaaataaacaaaaacactccatgaagctgaagtagtaaaatgagactccagcttcgagaacagacacggtattaaaattggggcatctttgggtctggcatctccacccaggccatttgacatgtgagaaaatctcgagaggtgaagtgacttgcctgaggtcactgggttgattttgacaaaatgaagatcaatatgcctgtttcctattctgagttagtcactgtccacagcaccgccttccccaccaccaaggggaagagaggctgcaggacaaggtgagcgcacccatgtccttcctgagatgaggcctgtgcactcttgaagtattctctgacttcaagggagaaccagtgggaacgtcaggcttggaagaccaagtcagggactcaattacggcctcactgtcattgtttctagctacaaactataaacaccgactgcctgaatggagaagaaaatgtatcagaaggtaaacaggcagctcacagaaccaccacaagaccctaaaactaggtttaaagctgcacagtcagggacaacaccccccgacggaacccaaaccctatgtgccgagaaacctcgatgtgtccccagccggctcagcggcccctgctgtgccaggaattcagatgtgctgcactgccgaccatccacagtggacattctcgggagtcctggcctccctcagaacccccacgctcccctaaggtctggcacaggcccctctggttggccagccctcgtcacatgcgctggctgtagttgcaaaagggaggctgagaaaggggaaacggaacatttccgtttctctagtagaaggtgaggacctcctcccgatccaatcataaagtaggagtcccccaaacatgagaaaggagttcaaatgcccagtggctccaaaaagaagataaatgtcctccacctgttggaagtggggcataaagaagatggatgagtcctagaggaggaagggagaggagaccctccacagagcaggggcagctgagtctgttaagtgaaatttgacttagtggtgcaggaacatgacgcatgaggcataactccactatcccaatagcacagggctagggttgccagatgaaagtcacatgcttggggaattgcaacacaggaagagaaattgagcaatgaagagaaattgagaaatgaagtctccgtacattaaagaggaagggaaggctaatctcttcctaccctggttaagaaagaatttgaatggagaagaggaggaaaggaggctgatttgcattaagcacctactatttttgagcaccaggccctgaaatgtggctggcgtgatctcctttaatgtggagaaacagaaacagtacaatcttgataatttggggatttgggaaaagactcctttcccgtatgtttcttccgttagtgttacagcctcctggcctctccccttcctgcaagcccctcctggaaagaggaggtgattgtgagctgcagagggcagtgtaagcctggctctgcctgcctcctgctttcccttgggtggggcctcccatcggcagctggcgagcacagctgtcatgcagccagccctgcagtgaggcccgcatgtctgagtcctgcctatgaccaggcaggtgggtctaattctgggtatgacattaggatgttggttgttgcctggttcatctaagccacaccctcaatccgggcctttatcagcaatgagggtgatactgcaatccatacctatcttactcctttatgtctcaatagtttagaactcacactgaggaaaagggatgctccttaccaatcccccttctcaaatctcaccagtaatttctgataggattagcacagcatttgacaaatattaaaggattcaatttttaatcatcctaggaagcagggctcttaacttgagatttggggatggacttcagagcatgggacattcatttattcattatttttcttttcttttcttttcttttttgagacagggtcttgctctgttgcccagtctggagtgcagcaatgcaatgacagctcactgcagtgttgacctcttgggctaaattgatcctcccacctcagcctcctgagtagctgggaccacagacatgccaccatactcaccccctctaccataaagtctgagggaaaattactttctctccaagacattcttgcagctgaaaatgttacataacatagttggccaatgaagtataagccaaagaattctgggagcttctggaaaaattttgcttccttgattggagctgtgattcttttttttttttttttttttttttttttgagacagagttttgctctattgcccaggctgcagcgtcagctcactgcaacctctgcctcccaggttcaaggtattctcccacctcagcctcctgagtagctgggattacaggtgcccaccaccatacccagctaattttttgtatttttagtagagacaatctttcaccatgttggccaggctggtctcaaactgctgacctcaggtgatccacccacctcagcctcccaaagtgctgggaccagccactgtgcctggccaatgtcattaatttcttatgtgtcctttcagagatactttatttggacacaagcaattacaaatacagttgaccctctgtatccacagcctctgtatctgcaagttctgtgttcatggattcactcaattgcagatcaaaacatattgaaaaaaacaataaaaatagtagtacaatagtaaaaaatacaaatacaaataaataatacaaataaaaataaaaatagtaaaaaataatacaaataaaaatatcataagtaatctagaaatgatttaaagtatacagtaggatgtgcaaatactatgccattttatataagggacttgagcatctttagatactggtatctgcaggggtcctggaactaatgccctgtgaatatggagggatgatgactgtatatgtatcttttgcctccttttagacaaatagtagaatactatacacactgttctgcatcttgctttttttcacttaaaaacacatcttggtgacaattccatatcagtacttaaagcatgccaaactctttttagcatcagcatactattccactgtgtgactggagcataattaatttaaccaattccctaccatgggatgtatatgttatttggaatcttttttaaaggatagaatccagctcaagaacttctagccatgcaagtgactcaaagctttaatgcagagtaactttaggcaagttgcttaacctctctgaggttaagtgtttcttatcttccttcccaccacaatggctccccagagcccatcactgccctggggaagtgcttttatatttccagccccacacagtagcatccaccttcatctggggagtgggggtcgaggaggcaggaataggaggtttcaaccagaggacaggtccccagtgtcttggccaagggagcctggtggggggctctctctggctgcttctcacgcccttatgttgtcaccctctgaaatatgctgtttgccttccctgacgctgacctagttggcaaggactgcagaacaatgtcaggcccagggcctggtgcatcctggggatgtcaccgcagagcaaacatgagtttgctggctgggtgtcaacaggaagatacattaagggcaaataggagcgagatccctggcatggaaacaagaagaaggctggctgctggctctgtgtgggagtttgtttatttattctataaaacagctttattgatatgtaattctcataccatacaattcaaccatttaaagtggacaatctagtggtttttgtgtattcacagagctgtgcaaccatcgtcacaaggaattttagaacattttcatcacccagaaaagaaatgccatgccccttaggcaatcactctcccatgcccgccctcttttcagtcctaggcagccactaatctactttatgactctatagatttgcctgttctggacatttcatacaaattgaatcatataatacatgggtttttttgactggcttttttaacttaagcataatgtttccaaggcttatccatgtcgtaacaccagtactcacttcttttcatcaccaaagaatattccattgtatggatataccacatttttggccatttcgaataatgctgctatgaacatttctgtggacatgtgttccatttctcttgggtatatacctaggagtggaattgctggtcatatcgtaactctgtgtttaacctttggaggaactgccagactattttccaaagtggctgcaccattttatattcccaccagcaaggcaggaaggtcccaatttctctcatcctcaccaacacttgttgttcccccccacccccccgcagctaatccttttatttcatttttaaatttttttattttagattgagggtacacatgtaggtttgttacaagggtatattgtgtgatgctggggttaggatttctattgatcccatcacccaggtagtgaacatagtacccaataggaagtttctcagcccttgccccacctccctctttttggagtccccagtgtctattgctcctatctttatgtctgatcaacgtttgttatatgtcaatttgatgtagccatcctagcaggtgcaaaatggtatctcattgtggttttgattcgcatttccctgaagactaatgatatttagcatcttctcatgtgattattggaaatttgtatatcttctttggagaaatgtctattttggtcctttggtcctttgcccatttataattggatatttgtcttttttattattgattgtaacagttctttttatattctagtgtggtgtcttattttaatctttttgaaataaatgttttctcagtcatactcatatactctagagcagcagtgtgtttgaatccaaagaacacacacaggcaaggcagggtggctcacgcctgtaaacccagcactatgggaggccaaggtaggcagactacttgaggtcacgagtttgagaccagcctggccaacatggtgaaaccctgtctgtactaaaagtacaaaaattatggctgggcacagtggctcactgctgtaattccaacactttgggaggccaaggcaggcggatcacgaggtcaggagtttgagaccagcctgaccaacatggtgaaaccccgtctctattaaaaatgcaaaaattagcactttagagaatctcacggttccaagatggccgaataggaacagctctggtctgcagctcccagcacaatcgacacagaagacgggtgatttttgcatttccaactgaggtacctggttcatctcattgggactggttggacagtgggtgcagcccatggagggccagccgaagcagggcaggacatcagctcaacagggaagtgcaaggggttggggggattccctttcctagccaagggaagccgtgacagattgcagctggaaaatcgggatactgccacccaaatactgcacttttccaatggtcttagcaaatggcacaccaggagattatatctcacacctggctcagcaggtcccacgcccatggagacttgctcactgctagcacagcagtccgagattgagctacaggcggcagcctggctaggggaagggcgtctgccattgctgaggcttgagtaggtaaaaaaaagcagctggtaagctcgaactgggtgcagcccaccacagctcaatgaggcctgcctgcctctgtagacttcacctctggggcaggggatagctgaacaaaaggcagcagaaacttctgcagacttgaacatccctgtctcacagcactgaagagaacagtggttctcccagcacagtgtttgacctctgagaacagaaagactgcctcctcaagtggatcccgaacccctatgtagcctaactgggagatacctcccagtaggggctgactgacatctcaaataggtgggtgcccctctgggatgaagcttccagaggaaggatcaggcagcaatatgtgctgttctgcaatatttgctgctctgcagcctccactggtgatacccaggaaaacagggtctggagtggacctccagcaaactccaacagaccagcagctgtacctgactgttagaagcaaaactaacaaacagaaaggaatggcatcaacatcaacaaaaaggacatccacaccaaaaccccatctgtaggtcaccattatcaaagaccaaaggtagataaaaccacaaatggggagaaatcagagctgaaaattctaaaaaccagagtgcctcttctcctccaaaggatggcagctcctcaccagcaatggaacaaagctggatggagaatgactttgacgagttgacagaagtaggcttcagaaggtcaataataacaaacttctccgagctaaaggaggatgtttgaacccatcgcaaggaagctaaaaaccttgaaaaaagattagatgagtggctaactagaataaacagagtaaagaagaccttaaatgacctgatggagctgaaaaccatggcaggagaactacgtgacacatgcacaagattcagtagccgattcgatcaagtggaagaaagtgtatcagtgattgaagatcaaattaatgaaatgaagcaagaagagaagtttagagaaaaaagagtaaaaagaaacgaacaaagcctccgagaaatatgggactacaggaaagaccaaatctacatttggctgctgtacctgaaagtgacagggagaatggaaccaagctggaaaacactcttcagggtattatccaggagaacttccccaacctagcaaggcaggccaacattcaaatttaggaaatacagacaacaccacaaagatactcctcaagaagagcaaccccaagacacataattgtcagattcaccaaggttgaaatgaaggaaaaaatgttaagggcagccacagagaaaggtcaggttatccagaaagggaagcccatcagactaacagctgatctcttcgtcagaaactctataagccagaagagagtgggggccaacattcaacattcttaaagaaaggaattttcaacccagaatttgatatccagccaaactaagcttcataagtgaaggagaaataaaatactttacagacaagcaaatgctgagagattttgttaccaccaagcctgccttacaagagctcctgaaggaagctctaaacatggaaaggaacaaccggtaccagccactgcaaaaccatgccaaattctaaagaccatcgacactatgaagaaacagcatcaactaatgggcaaaataaccagctaacatcataatgaaaggatcaaattcacacataacaatattaaccttaaatgtaaatgggctaaatgccccaattaaaagacacagactggcaaattagataaagagtcaagacccatcagtgtgctgtattcagcaaacctatctcacatgcagagacacacataggctcaaaataaagggatggaggaagatctaccaagcaaatggaaagcaaaaaaaagcagggattgcaatcctagtctctgataaaacagactttaaaccaacaaagatcaaaaaagataaagaaggccattacataatggtaaagggatcaattcaacaagaagagctaactattctaaatatatgtgcacccaatacaggagcacccagtttcataaagcaagtccttagagacctacaaagagacttagactcccacacaataataatgggagagtttaacaccccactctcaatattagacagaccaacaagacagaaggttaacaaggatatccaggacttgaactcagctgtgcaccaagctgacctaatagacatctacagaactctccaccacaaatcaacagaatatacattcttctcagcaccacatcgcacttattccaaaattgaccacatagttggaagaaaagcactcctcagcaaatgtaaaataacagaaatcacagcaaactgtctctcagaccacagtgcaatcaaattagaactcaggaataagaaacccactcaaaactgcacaactacatggaaactgaacaacctgctcctgaatgactactgggtacataatgaaatgaaggcagaaataaagatgtttttttaaaccaatgagaacaaagacataacatactagagtctctgggacacatttaaagcagcgtgtagagggaaatttataccactaaatgcccacaagagaaagcagaaaagatctaaaactgacaccctaacatcacaattaaaagaactagagaaacaagagcaaacaaattcaaaagctagcagaaggcaagaaataacagatcggagcagaactgaaggagctagagacacaaaaaaccctttaaaaaatcaatgaatccaggagctggttttttgaaaagatcaacaaaattgatataccgctaacaagccaaataaagaagaaaagagagaagaatgaaatagacgcagtaaaaaatgataaaggggatatcaccacagatcccacagaaatacaaactaccatcagagaatactataaacacctctacacaaataaactagaaaatctagaagaaatggataaattcctggacacatacaccctcccaagactaaaccacgaagaagttgaatccctgaatggaccagtaacaggctctgaaattgaggcaataattaatagcctaccaatgaaaaaaagtccaggaccagatggattcacagccaaattctaccagaggtacaaagaggagctggaaccattccttctgaaactattccaatcaatagaaaaagagggaatcctccctaactcgttttatgaggccagcatcatcctgataccaaagccgggcagagacacaacaaaaaaagaattttagaccaatatccctgatgaacatcaatgcaaaaatcctcaaaatactggcaaaccaaatccagcagcacatcaaaaagcttatctaccaagatcaagttggcttcatccctgagatgcaaagctggttcaatatatgcaaatcaataaacgtaatccatcacataaacagaaccaaagacaaagaccacatgattatctcaatagatgcagaaaaggcctttgacaaaattcaacagcacttcatgctaaaaactctcactaaattaggtactgatggaacatatctcaaaataatcagagctatttatgacaaacccacaaggaatatcatactgaatgggcaaaaactggaagcattccctttgaaaactggcacaagatagggatgccctctctcaccactcctattcaacgtagtgttggaatttctggccagggcaatcaggcaagaaaaagaaataaagggtattcaattaggaaaagaggaagtcaaattgtccatgtttgcagatgacatgattgtatatttagaaaacctcatcatctctgtccaaaatccccttaagctgataagcaacttcagcaaagtctcaggatacaaaatcaatgtgcaaaaatcacaagcattcctatacatcaataatagacaaacagagagccaaatcatgagtgaactcccattcacaattgctacgaagagaataaaatacctaggaatccaacttacaagggatgtgaaggacctcttcaaggagaactacaaaccactgctcaatgaaataaaagaggacacaaacaaatggaagaacattccatgctcatggataggaagaatcaatatcatgaaaatggcgatactgcccaagttcatttatagattcaatgccatccccatcaaggtaccaatgactttcttcacagaattggaaaaaactactttaaagttcatatggaaccaaaaaaagagcctgcattgccaagacaaccctaagccaaaagaacaaagctggaggcatcatactacctgacttcaaactatactacaaggctacagtaatcaaaacagcatggtactggtaccaagacagagatgtagatcaatggaacagaacagagccctcagaaataacatcacacatctacaaccatctgatctttgacaagcctgacaaaaacaggaagtggggaaaggattccctatttaataaatggtgctgggaaaactggctagccatatgtagaaagctgaaactggatcccttccttacaccttatacaaaaattaattcaagatggattaaagacttaaatgttagacctaaaaccataaaaaccctagaagaaaacctaggcaataccattcaggacataggcatgggcaaggacttcatgcctaaaacaccaaaagcaatggcaacaaaatccaaaattgacaaatgggatctaattaaactaaggagcttctgcatggcaaaagaaactaccatcagagtgaataggcaacctacagaatgggagaaaatttttgcaatctacccatctgacaaagaactaatatccagaatctaaaaagaacttaaacaaatttacaagaaaaaatcaaacagccccatcaaaaagtgggcaaaggatatgaacagatgcttctcaaaagaagacatttatgcagccaacacatgcaaaaatgctcatcatcgctggtcatcagagaaatgcaaatcaaaaccacaatgagataccatctcacaccagttagaatggtgatcattaaaaaatcaggaaacaacaggtgctggagaggatgtgtagaaataggaacacttttacactgttggtgggactgtaaactagttcaactgttgtggaagacagcctggcgattcctcaaggatctagaactagaaataccatttgacctagcaatcccattactaggtatataccctaaggattataaatcatgctgctataaagacacatgcacacgtatgtttattgccacactattcacaatagcaaagacttggaaccaatccaaatgtccatcattgatagagtggattaagaaaatgtggcacacatgcaccatggaatactatgcagccataaagaaggatgcattcatgtcctttgtagggacatggatgaagctggaaaccatcattctgagcaaactatcgcaaggacagaaaactaaacaccgcatgttctcattcataggtgggaattgaacaatgagaacacttggacactgggtgaggaacatcacacattggggcttgtcgtggagtggggggatgggggagggatagcgttaggagagatatctaatgtaaatgacaagttaatgggtgcagcaaaccaacatggcacatgtatacctttgtaacaaatctgcacattgtacacatgtaccctagaatttaaagtataattaaaaaataataataatacaaaaattagccaggcgtggtggtgcgcacctgtaatcccagctactcagcaggctgaggcaggagaattgcttgaacccaggaagcggagcatgcagtgagtcgagatcgagccactgcactccagcctgggtgacacagcaagacttcgtctcaagaaaaaaaaaaaggtgcaaaatgatacaacattattacattgaatctgtagattgcttttggtaataaagacattttaataatagtaatttttcaaatccacgagcatggggtatctttccattttttgtgtcctctttaatttcttttattcacattttgtatttttcattagttctgaatctttattatagtggtggttacaaacatctatatatgtgatacacatacaaaatgctgattttgacatgatactctgataatgtgagatgtgactactgggggaaactgggtgaagatattcagttctcaagatccacattgggcctgatccagcccctatacaggctctcagatggtgtataattctacttcctgtgaaagagacagaaagagggaccaggccctgggaagaagagtgggcttggccctgaaaaggggattggtgagagtaggagggaggggacccagaaggtgcgctctgtttattctacacctttgtttgtcgccatatcttgcccactgtctacagacttataatgagtaactaaatgaatgatgtcaaaagctgagcccttggtgtaaaacaggcactcttcctcagttcctcagtgccaaaacccatcccattgcctctggaccccggtcctctggaagctggaaggaggataatcatgcttttcctagaagctccaggcaagctaccagtggtttggatatttcattcctgcagcccttgactgggctggacctgctgccccaggtacgtgttacagtgcaggagcgtagtatgtcaaccctgaagcttcctgatgcaagccactgaacgctcaactcaaaagggcttaagcaataatgaaaagtatcctttcacataagaagaattctggaggtcaaggagttccattattggttcatttcccagaacaatttggtcatgaagtactcaaattctttccacttcatcttcagtggattggctattcagctttttcatatttgccaatctgacacataaaaaatggtatgtaataaacaagacacaagtttattgacattctggagtagtcactagcaggaagggttttgagaaaatactcagactcttcctgccccagaaggtgtatccagcaaatcaactcctgggatctccaaacagactggattaaaaatggaaaatagcaaaggatcttggcagagaatcctctctgactttgtcagatacaagactaaaaaaaaaaaaaaaaagttattgtcttgcttcctaaaacaaattctgataaagacccctaagaatctaaagtcaattgaacacagaaagtttaaagcaaaggaatttccctacgtcctgccaggaagaggaatgtttacaatctctgcacatggcctaacatggctcccctaaaaacagacttcccttgtttcaatttccattaaaagaggagcataagggctttttttttttttttttttttttttgagacagagcctcgctctgttgcccaggctggagtgcagtggcatgaacccagctcactgcaagctctgcttcccgggttgaagcaattctcgtgcctcagcctcctaagtagctgagatcacaggcatgcaccaccacacctggctagtttttgtattttttgtagagacaaggtttcaccatgttgcccagactggtctggatctcccaaccttaaatgagtcaccatgcccggcccgcataaaggcttttctaaaccagtgctgccccagtagaattttctgtaatgctgaatatgttttatatctgagctgtccagtagagtagccactgtcatgcatgtgtgagtatgtagcacttgaaatgtggcaagtgtgaataaggaactgaatttttaattttaagaaagtttacttaatttaaatttaaatagccacatgtgactaatggctaccatattgaacagagcagttctaggtagacttgtttggggttttcttttgctaagagcgatgccccaggtcttactggtccaggatgcctgtaactgcaacctctggacacaactagggttgttgctgataaaccacaggatagtatagcttcaggtttttataataataaaaataaataaagtgaaaagagtagaggatgtttatactcaaaatcacaggcaccaccccatctccactccagccacaggctgagtctgcacaaatgaaatcaagtgttgagctgagctaaataccttgctgagaaagggaagtttggtaggagaggtgaggaagacagaaggtctgagcattgttgaattacctggatgtaagtgttttacttcaccactttgtccctaatatcacaacacaattattgaagggagtacatgccaggcacaattgcaattttactttattaaatgttcacaatgtgtaagcaactgtacagaacatagaaacaattgtcctcatcctccaggactatataccctggtgagatgcgtaaaaaaaataataaagaaggccaggctcagtggcttatgcctgtaatcccagtactttgggaggctgaggcgggtggatcacctgaggtcaggagttcgagaccagcctggccaacatggtaaaaccccatctctactagaaatacaaaaattagctgggcatggtggcaggcccctgtaatcccagctactcgggtggctgaggcacaagaatcacttgaacctgggagacagaggttgcagtgagccaaggtcataccactgcactccagcctgggcaacagagtgggactctgtctcaaaaaataataataattaataataataacaataataaaggagattgagtgcaggtaaaagatatcatgatgaaaaaaaggatggataaaccaatgatgtgtgattttcttctattatggattttaaaaatacatactttttcccctataattattgaaatgatatttgcccattatggaaaaactgaaataaacatataagcacaaagaaaataaatatcagctataatagcatgaaaatatttccttaaccaattttcttttttaaaaaaatatatttttaggttgggcacggtggaggaagttctctaacaaagagaaaaatcaagctagagaatgttttaaggtaaaggaattgaaataaattactcacgttcattgctatctaaatacatgatgacaaaaacgggaaagtagaataaaccataacccaaactctagataatacaaacagcaaacataaaaaaccagagctagtaaaatatacctaggtacacacatgtttggtagagaacacatagatattgacaaggttaagaagctgactacagggaaatataggtattaatgtaagggatataccccagaagaataaaaatagaatgtatatcttaagccaacagtagaagaaaatttgttctatccaatgaaaggaaaaaaggaataaaaaagaaataaaagtatgaaatagaaaatatgaaattaaaattatagaaatagttctagtagactggtgattagaatttatgtaaataggttaaattcaccaataaaaaaattaccaaattggattttaaaaataggctggccacgatggctcatgcctataatcccaacactttgggaggccaaactgggaggatcttttgagctcaggagttggagaccatctctgggcaacatagcaaggctctgtctctatttgaaaaaataacagagtatcagataaggtagaactttaatttctcccccaaattgtaagccaatttctccttcattatttgttgagaaatttgtatttgtattctcccattaccgaattgtgatgccaactctgtctagtactcatgatttatatgtatttgggtttgtccttggatggtggactctagctcctgcttcaatgaaagacttgtcccaccgctggtagtgttgtcagcggagtattcaggggtcatctcctgcagggattttctcagctgtagagagccaccacatctgaggagttaccccttcccagtggcctacatccagtgactcattcctgtgggtataaatgcctggccacaggtcccacttgagacaactccgaaggccattgagcacccggctcctgtgggtttggccagggctcttgggtctactgaatcatggtttgacttctccccctgtctgcttgtccttcctccttcccctcccatccactggtggtgatcccaagggtgctcctacatgtgaacaccctgcatgctaaccctcgtctcagagactgtgacacttgactttgcattctgtgccacgcagtggcctgtcctttccgcagtgcactgtgaagtcagcttccttttagcaagcttaaggtctacagtgcaagtcctgcgcttgatgatgccaggactgagcttgtttaatttggttacttttccagatgtttcattaagcgccaaaaaaaaatttccttgtcactttgattggaattacattaaatttataaatttatttaaggacaacatcatcttgataatatccagtcatcccctcagggaacatgctttaccttggcatacactctttctttaatgtccttcattaaaggtttgtggttttctatttctttttttctttgacacagtgtctcgctctatcactcaggctggagtgcagcggtgtgatcgtagctcactgtggcttcgaacttctggactcaagccatcctcctccctcagcctctcaaagtgttgggattacaggtgtgagccaccacacccagcctggttttctatttctatttgcattgttattataaaataatacatattattatagtatatatgagatatatactggcttttatataatctatttttttaactaacatgtaaaagctattgatttttataaaaatacttattttatatacttcttttataactggtctcttgggtttttaggtaaatgttcatgggattgtgcaaatggcaataaatttgacacctttccaaaagttttattttacttgtttttcttgttgttattcaatgactggaattttgagaccaagcttaagcagcagtggggatagtttcagattactagtgggaatgtcccaagtattaaccgttaaggaaggtattagtttgggacattaatcatatcaaaaaagcagccttctaattcttaacataagagtttttgtttgttttaaaaatcagcgatgggccgggcgcagtggcttacgcctgcaatcccagcactttgggagaccaaggcaggtgggcagatcatttgaggtcaggagttcgagatcagcctggccaacatggtgaaaccccatctctactaaaaatataaaaattagctgggcctggtggcacacacctgtgatcttagccattcgggaggctgaagcatgagaatcgcttgagcccaggaggcgaaggttccagtgagccaagatcatgccactccagtccaacttgggtgacagagcaagactctgtcttaaaaaaaaaaaaaaaaaccagcaatgttgtcagggtaaatttaaatattggcatctttctattgcttttgcctggaatccctttaagtctacatatataggctttgtttttcaattcggaagtttctttgattacatcctccattattaggtctgtttcaatgttcctgttttagcctcagcaacatcttaagttcttaatttttatcttccttctctgtcttctatatttattgccttttctcatgttattttgaaatttattcttttcttctgcattttaggaggacttttgggcctccatattgtggattcagttttccatcttcttgaatctagaggctttactgccgctcatgtattttcaaattccattatattgttttagtccatttatattactttcttatccaattccccttttgaaaaaattttagtggcctctgcttttcatctcagtctactatttgagaacatcaattttgagctattgtttcacagagtccatgttttcattttgttaggatcacaataaagtttatcatctaaaatttataggttggtgcaaaagcaattgcagtttttgccattaaaagtaatggcagggtattaaagtaacacttcagtcttctaccgtaattctgatgtcagttggattcagacaaccctgggtcaaccttccatcccatgggaagtccaatgccacacccaagatttctagggttccttgtgctcactgcttgctccattttcctgttcctgctcactagagctcatttgtttctttcatttcatgcttgctttcctctctgctcagggcctactttcttcccaaggttcttgaacttccatccctttctctccccagactctcccagatcacatcctctctggtctgcgccagctcctcccaattctggttcctttcatatctctggatctttttgctcaccaaaccatcttagccatgcctagaaggcttcatcttcaaagctagtcatgctctgcaagatatgttcttaaacacatttccccccaccatgagaaatgaagtattctgctcataaagtaacatttttttcctcctcagtatactaccattcaccttattcaatagcttggttttcctcttgagtgttacgttctcttctcttcatgatacagaatactttcatagttccatgttggttttaccaccatttcacctttgaaaatggagagatttatctaaactttctaggtgaccctgaaacagggtaaaatgattttcttgggattccatcaccagtcgctgttacaatgctcttctctgttcttagtttgaaggcctctttgatgcttagaataagggaagaagggatccagagctatgagctgaagggcagattctgtgattctaggtgttcggggatgcaccaggctcagctttctgactggccctgcgatgactggcctgggggcctcagcatccaggtgtatcccagcctattgtagtgtccactgtctctagaaggagtcctatccctactcccacaccgtgatattctccatggggtggccagtttaaccttggaccacgtgcacaactgtttttaaaggtaaaaaggattgcaagtagtgcgattgacccaaggtctattttactgttaactcttgctctttctaattaggggatgttactaagatctgagatctcaattattccaggatgctgtttcttggggagaagggaggtcagggtatacctggagctttttcttccatgcagatttcttgctgtagtccagtagaaagtcctcaatatttttgaaatgtagatgataaccttttctagttgtagcactgatatttattttacttatattgtattcctttcaatcaggagctgggggtgtggggtgggacaggattagatgttgacattcaaagtcaggctggacgcagtggctcacacctgtaatcccagagctttgggaggctgaggcaggtggatcacttgatgtcaggagtttgagaccagcatggccaatatggcaaaatcccatctctacgaaaagtacaaaatattagtcgggcatagtatcatgcacctgtaagtcccagctacttgggaggttgagctgggagaattacttgagccaagaggtcaaggctgcagtgagccattgcactccagcctgggcaatagagtgagaccctgtctcaaaacaaaaacaaagtcacctatcctattcaaaagtaccaatagtttcttccttttgtgtttagtttatggaaaagttctttcagtttaaatcaggcattcataatatttcaagtctgaaacatgtctagagaaagggtctactcaaatacaccatcacaacctgtttgtgcaggcacggagctgggtagcactgcctctatttttgttagaatgatctttggatttccttactcctgttctgttagggagaaaaacagcttagaaatatctgaacaattcccaaaaataatacacggctgaaaattcctttggctatagttttctcaggaagcagatcaagcctttccatttcctagcagatccctcaacagtcaaaaggacagggaatgtttgtaagggtatcttgtgtgcttctgttctcaccagccctcaggtcccctggaaacaccagactctaataagcaaaataatctaaggagtaaagaaatagcaggcaccttttagataggatgcgctgcagccagaacattgacgtgcggtcagctgggcaccaagttgctgttttgaatttgtgaaagttccatctgtttggtaaccaaaatccagggaaggaaaaaattctgctccaagtaaactcaaatttagtggcattggtagaaagatgtgaataagatgagcttccatttggtaagcaacatccttctatcagacaggcccatgggggagtggcacatgtggctttgggttaagtcacagaggggttccagaaactctgcactgccacagacagacagtcaggagttcaagaccagcctggccaacatggtaaaacctcatctctactaaaaatacaacaattatctgggtgtggtggtgggtacctgtaatcccagctacctgggaggctgagggagaagaatcgcttgaaccttggaggcggaggttgcggtgagctgagatcatgccactgcactccagcctgggcgacaagagtgaaactccatctcaaaacaaaacaaaataaaaattatctgggtgtggtggcacgtgcctgtaatcccagctgctcaggaggctgaggcaagagaatcacttgaacctgggagacggaagttgcagtgagcggagatcgcacactgcacttcagcctggacaatggagcgagaccctgcctcaaaacaaataaaataataaagaagctctctgaatatttccctttacggtcctcttgaacactcttgcttaacctttgtgtgcctcagttctttgactggtccttccctgttctgacattgttatctatagcatgcattttcttacttccttatgtgagtttgctaagctgaagttggaatttgtgaactttggacatttcttctccatttctcttgttattgctcagtttggagaagtgagggtataggatatgggtttgcgtgtgcatgtgtgtgtgtgtgtgtgtgtgtgtgtgtgtatcagataacaaaagatctaagatacctctagcaaaaaggccatcaaaagagaagtgggttgcccttagattagtggcacaactggtctaaatagacccagtataaaatctctgtgaggtctttatgctttctgcaacctcttgcatacacaagcatactttgttttgccatacttcaggacattaccttattaataattaaacaccattgtttttaataataccaacatattataaaataactgtatataaaaattttaaatctaggccgagagtggtgactcatgcctgcaatcccagcactttgggagaccgaggcaggtggatcacttgaggtcaggagtttgagaccagcctggccaccatggcaaaacaccatctctactaaataaaaaaaaaattagccaggcgtggtggcgcacactagtaatcccagctactccggaggctgaggcatgagaatcgcttgaacccaggaggcagaggttgcagtgagctgagatagtgccactgcactccagcctggatgacagagggagactgtctcaaataaataaataataattttaaatctaacactaaaatcagaaacacaataacttaaataaattctgtccatacaaaatattgtatgtgatcttataatcatcatcatgatttatttggcaaagtcaccaaataagttttgcaatttccagttgcttgagctactctactattcagagcactctgttaaatattgttccatattgtttgccttccttatcagtatttcccaaacttccctgatgatatgaatcacctgaaaaacatgaggtgcctctgtcactcaggatttggtgcccatagtggaagaacaatctgcaattctcaacatccaccaacatgttcaagccccagtgctctcagcttttgctcttcgtttgcaacatgaaaggtgacagaacaatgcctcaaaattgggcaatagcaggctttatttagttagtcagtttattttttatcagctgcaataaatacctttactataggtatttattgaattgcttttgaatttttaaattgacacattataattgtactttttttttttttgagacagtctcgctctgtggcccaggctggagtgcagtggtgcgatcttagctcactgcaatctccccctgtggggttcaagtgattctcctgactcagcctcctgagtagctgggattacaggcaccagccgccatgtctaatttttgtatttgtagtaaagatggtgtttcaccatgttggccaggctggtcttgaactcttgcccccaagtgatccgcccgcctcaacctcccaaagtgctgggattacaggaatgagacatagcgcccagcctatcctgactttttagtaattttgctaaaacgaagttaagacaaatacattttatgaaataaatatataaaagttataaattatgcttgttttattttgttttatcttccaaacattcctgatctatcaactgaacatcaagatatatcaagatataaacaataatatatttactaatttggatactaaccatcactttacatgtattttttaaaatgttgccattttgaagatatattcatcaaggaaggagagtggaacacaattcacttaataatttgtttatctgacttatgatttttaaatatttagccatatggcctgtgggccttagtcccagggactggaaatgttagggctggccctaacagcaacttcctggggagggttgtccattcttttgcacttgtagcctttctcttgggaatgagcttttctgaagttctaagaaatataatttcctcctccaccttacatgtaaaggacagttaattttaaatctcctggacatcggtttcaagctttcacataatttgtatgtacaccttgatgttctcctattgtaccaggactaggactttaaacaacaaactgcttaaggtcaaaagcctgggctggacgcagtggttcatgcctgtaatcccagcactttgggaggccaaggtgggcagattacttgaggtcaggagttcgagaccagcctagccaaaatggtgaaaccctgtgtctactaaaaatataacaattagccagacatggtggcaggcacttgtaatcccagtcacttcggaggctggggcatgagaatcacttgaactcaggaggtggaggttgcaatgatccgagatggtgccactgcactccaacctggggtgacagagcaagattcagtctcaaaaaataaaaataaaaaaaagaacaaaagcctgttagaactaaagagtagaggtcgggtgctctgtgggtcacggctgtattcacagcactttgggaggccgaggtgggcagatcacaaggtcaggagttcaagactagcctggcaaacatggtgaaaccccgtctctactaaaaatacaaaaattagccacgcgtggtggcaggtgcctgtaatcccagctactcaggaggctgaggcaggagaattgcttgaaaccggaaggcggaggttgcagtgagctgagatcatgtcattgcgctccagcctgggctaaagagcaaaactctgtctcaaaaaacaaacaaacaaaaacctaaagagtagaaaaaaacagaatcctacaacccctaatcaaaaccaggtactcagagcagaagcgccggtgcttgtcagaaatgtaaaatctcaggtcccaattcaagcccactgaataggaatatacattctaatgaccagatactgtggctcacgcctgtaatcctagcactttgggaggccaaggcgggcagatcacctgaggtcaggagttcgagaccagcctgaccaacatggtgaaaccccatctctactacaaatacaaaaactagccaggcatggtgacacatgcctgtagtcccagctactcaggaggctgaggcaggagaattgcttgaacctgggaagcggaggttgcagcgagctgagaccgtaccactgcacttcagcctggacggcaagagcaaaactctgtctcaaaacaaagaatatacattttcacaatatccacattaccctatatacccctatacccactaaagtgtgagaagcacttccgtaacctctggactgaggcaattaaaggaataaagttgagaaagagtggagaatgatggctgtggatcagatagatgtctgggtcgggggcaaccatagaagtacttctcacactttagtgagaagcagctagactcccaaacagtctcagtttctgctcttcctcaaacctatggttaattttaggggctataagcctttgcttctagcaaccaatggactcttgactagaagagcaggtaaactaatgctagtaacctaattccaaatactctaaaactatccatttattatccttctattagtgttggcccagaaactggggagaatgggaagagtgaatatgggtgggaagagagaatgtgtctctgaggattgacacctaggtgagtgagcactcagttttagtactcacatctagcctagaggttatcacagcacattttatttctcattacttggtttatctctgtgttttttaaaattggagaaaacactaagaaattcaatagaaagcccagattaggggtattgttggttaagtacttatttagagcttagattatccaagtcaattttgctaataggctcttaatattttaacatgctagagaagattaattagggagatttaaaataatactgctctagccatcttggctttaacctgggtctggattgttcatgatatgtatgggggagtgagggacagttggggggtggtgcaagaggggctctggaagagtcagttctggacaatccatttacataagagttgttgccaagggaacaggaacatctgcctacaccagagaacaggtgtctttggagggcagtgctgatctgagtgctaggggagaggtggttctaaaatatgctgaaggagctgttgcctgtaaaaagtctgaaatatcaggcgcaagcctcattgttttcatgcccaggtggatcaacacacgacaaaaaatggaggtgcggttccccacgccagcagcaggtcctcaagtggacctcagggcattgagggcagcagtgttgctcaagcacctcgagcttcctgggctgtccaggttttgttttaagctggcttactgtcctctgtgtcatgtgatcttgctttgttcttagtctacacgtttaaattcttgtccaaaatctgtttttgttttttttttcactcctgacatcatgcatatcccaatctttacttgtctgctagtctccaacaggatttacaatgacagtctcttaacaacctggtctccctgctgccattcttgtcatcctctccattctcagcttggtagctggaaggaactttgaacaatggaaacctcctcttaatatcccattgttggctgctctgcctatggatagtcattctttattcctttactttcttaataaacttgctttcactatatagagatagagatagagatatctcccaatgtcttcctgccatccttagcacaagtcaaatctcttatcctagtctgtactgccttgtgtgatctagcccctgccttcctctctgacattacctgctacctgctactgctctccttgcttttttcgctccatccatatgacttcctctttctcaaacaccctgagctccttctgcctcagagactttggagaagctgggctggctgcctgggctccaccttgtctcacctgaaatgctaccttctattgctaagcctttcctgatctatcagtctagagggcatgctctctgctgaagccactttctagcatatcattgtgttttattttttttcacagaatacatctccatctagaattcccatgagtctgtttcttgtttgtttgttcattccctgtctccctccagtacaatgaaagcttcatgactgcagagacctcatctgcctccatagctgctgcattgccaacacctagaacagtttcagggacataataggtgctcaataaacattcattgaaaacacaaacaagcaaacttcccagcatcgctgatctcccacttgccacttggattgattgcatgcatgcttgaatttgctcctctgttatggagactccaccctccatttacacctctttctggaaatcctgataaacctctcagatcaagccctgtccctggaattttctctagcactgggaaaggaaagctcatgcacagtttgactttgtgtgtttaaacttttggtgattggagtaactgcttcctatttcacagccactcgactctgtagagaaatatttctataagcattttgccctcagtcttgctccttctgcatgttgactttgtgctctgagacaacagccctgcttcctggcagcacctgagcctcacatccaaggaggccaccaacagtgacgtgctgattctccctcctaagtttctgtttgaaaactcctggaggacgccgggtgtggtggctcacgactgtaatcccagcactttggaaggccgaggtgggcacatcacctgaggccaggagttcaaaaccagcctgaccaacatggtgaaactgtctctactaaaaatacgaaaattagccaggcttggtggcatgagcctgtaatctcagctactcaggaggctgagggaggagaatcacctgaacccgggaggcagaggttgcagtgagctgcaatcataccactggactccagcctgggtgacagagtgagactccatctccagtaaataaataaataaataatatggtttggctgtgtccccacccaaatctcaacttgaattgtatctcccagaattctcacatgttgtgggagggacccagggggaggtaattaaatcatgggggcggtctttcccaagctattctcgtaatagtgattaagtctcgtgagatctgatgggtttatcaggggcttccacttttgcttcttccttattttctcttgctgccaccctgtaagaagtgcctttcacctcccaccataattctgagccctccccagccatatggaactgtaagtccaattaaacctctttttcttcccagtcttgggtatatgtttatcagcagcgtgaaaatggactaacacaataaataaataaatatttttaatttcaaatatgcagcttttaaaaccaggttgggaaaacttctttaatttttaagattcaagaagttttttttaaatgatgagaaatgttcccaattacatttcaaagctacgatgtggcagttacagttctaacgcagttatttaagagcaaagcttgtgaaacgtatcacttctgacaaattcttcactttcctcagttatggttaaggctctcttgagtcctctcaaattctaaccattctatttgtggcctgaaaccttatcccagttgtccacatcatctttaagccagcaaccaagtagaaaggactgtgtttattgtacttctcaaaacgtgggatagcagaatcacttgacgtggttgtaaaaacacagattgctgagctgcaccctaggcatagtaactggagggtctctgggggtgagtccagaacattttttttttttttgaggcagaatctcactgtgttgctcagtctggagtgcagtggcaagatctcagctcattgcaacctccgcctcccaggttcaagcgattctcctacctcagcctcccgaatagctggaattacaggcatgtgccaccacgcccagctaatttttgtatttttagtagagatggggttttgtcatgttggccaggctggtctcgaactcctgacctcaggtgatccacccaccttggtctcccaaatgctgggattacaggggtaagccactgcatctggcccagagcacttttcttaatactcaaaattttataggtatccagcttcacctaccctaccctctacagaacagcatgcattgttcttacttgttaaacattacaaatagcaattctcagattccactgtggtgatgagagacaaacttaagcctacgtacttaaaaataaagcaaaagaaatttatttaaatgccaaaaagtaagaaaatacacgcaaactactagagagatcattcatttgaaggtctttggtttgtgtttgttttattttaaataagatgttcatttaaaatgaaggggttgtgcattaaaagtcttgctctgctatattttattttattttgagacagagtcttactctgtcacccaggctggagtgtagtggtgcaatcttggttcattacaattgccacctcccaggtacaagtgattcttttacctcagcctcccaagtagctgggattacaggcaagtgccaccatgcctggctaatttttgtatttttagtaaagatggagtttcgccatgttagccaggctggtcttgaactcctgacctcaggtgatccaccagccttggcctcccaaagagctgggattacaggcatgggcctcccaaagtgctgggattacagggttgagcccccacacccggcctattttattactttatggtacgaggaatacaatttcagaaaccttgattcatccagcagttttcttaatttgggcaaatgtccctgatgatggatttctatgtagtttccggagattaaataccactattattctttttttctcatacaaataatttttcccaaaaggtgcacatggggtcccaggaatgttagatgactcttccattgccctcttgccaaaggcaagaggatgcggacttgaatcctgaaaataatttttaaaaactttttttttttttttttgagacagggtctcactctgtcacacaggctggagtccaatggcgcaatcttggctcactgcaacttccacctccctagttcaagcaatcctcctgcctcagcctcccaagtagctgggattacaggcatgcaccaccacgattggctaattttttttttgtatttttggtagagacgggagacggggtctttccctattgttcaggctggtcttgaactcctgggttcaagtgatctgcctgcctcggccttccaaagtgctgggattataggcgtgagccactgcgcctggcctaaaaatactttttaatatttaaagattcataaacaattaacatgattttgagaaaagaggagcaaaggaatagactgtctctaccagacattacaatgccacagcaagaaaaagcgtgacactgtcatacaaacaggcaaaatagagagacagaatagaatagagtccagaaagagacacagttatgtgtgagggaaggatgtagagttgggaaacctgattcactaaatggattttttaaaatggctctccaggcatggtggcatgtgcttgtagtcccagctactcaggaggctgaggtaggaggattgcttgaccccaggaggctgaggctgcagtgagccgtgatggcacctctatactccagcatgggtgacagagagaaatcctgctcaaaaaaaaaaaaaaggtctctctatttcacaccataaataaactccaagtgtacaaaacacttaaatgtgaaaggtaaaaccataaaagtaatagaagaacatgtagaagaatatattcgtgaccttggattgagaaagagtttcttaaataagactccaaaagcataaaaccatgggcaaaaaaaaaaaaagatgaaattcactctatctgtgggcttatagaatgctttatccatcatcatagtattccacacgcactatttctaaccaaagagttcatttcacagcaaataaagtgtgaccaaaggcccatgttcatggaactcactgttcttaccatgttcctcattgtcctgaagcagctgcctcgatggaacagtagaatggcctttggaagactcaattatagttctagctagatggtaacacctgtggggctgaggcagtgttcttcagaaggcagtgtgtgttctcaatcagcatccaacatatggtaatatttctgtcatagccaggattcccaggtctggaagtcaaaggatgggaatgggaatagtttcttctcactattactcctagcaatccattagcgacacttctgctttccagccccatgaatggtccagagattttggctccaaagggataaatgcttccatcaggggcacaacaatgattccaatgaactggaaatcaagaatgctacccagccactttgggctcatgcctctgaatcaacaggcaaagaaggagtactgtctgtggtgattgatcctgaccatcaagagaaaatggggctcttccagggatgctgtctacaggcactcagaatggtccagcgtttgacatacattgtaggctttcctacaatacagcctctaacaaaactaggctgtcccgaaccaaaactaggctgtcccgaacccctggtaatagaattgtttatctttataccaagaagtttgggaaagcaccaaaatctgcatgtggcatgtgcccaggcagacttcaagtggttcctgctgtaagacctaaagttcttatgagattgtccaaaacaaaggaacatgtcagcagggcctgtggtggttccatgtgtgctaaatgtgttcgtgacaggatcaagcatgctttccttactgaggagcagaaaatcgttgtgaaagtgttgaaggcacaagcacaaagtcagaaaacgaaattaaaaaatgaaacttttttgagtaataaaaatgaaaagacttaaaaaaagaaagagaaaatgaggatgctgttatgaaatgagggtaagggggcatatgcctggaatgcaagagattctccagggttcccctttgtcctcccaagcccagggattaaagtcaattgaaaactataacaacccagttaaggcagggctgttgatggtccagacggttcaggaatgaaggtctgggttattttagcaggcagggaactaaaatcagctgaggtgcctgctgaggacacaaataataggaatgggaagtggaagaaagtagttataaatgaagtatggcaaggggctcatgctcatggaattcatttttttgtttgtttgtgtttttttgttttttttttttagacaagtctcactctgttgcccaggctggagtgcagtggtgcaatctcgactcaccaccatctccacttcctgggttcaagcgattctcctgcctcagcctcccaagtagctgggattagaggcacccaccgccatgcccagctaatttttttttttccgtatttttggtagagatggggtttcgccacgttcgccaggctggtcttgaactcctgacctcaagtggtctgcccaccttggcctcccaaagtgctggcattacaggcggtaatatgagccactacgtccggcgggaattcatattcttatcatgttcccatcattccgaagcagctggcttgataaaatagtttacagccatgtagctagctgcagaaataaggactgtaatgaatatttcttcctttttttacatgaatatgtttgtgtctatatgaataaagtagtttgattttctttccctctcccatacccatacttaatagcagattagatttatatcagtttttaaattgtggaataccaaaggaaaagtgtgaattaggtaggaaaatgaatacccttcaaaaactgaaaaggaattttgcctcatctttctggggaaagggttaacgtgttttgtgttgtacatggtacagttgtgtcatattagacagaaagatgccttagttgttatctttatttagaggttaagtgtggtttaaaacatgggtgccttaatcctggcctgtggagtccaggagcggaagtgggagagaggccggctgggaactgtagtagcctcacctcggtgttcacagcaggtaggtggtcattttgctaatggcttggtgagagtggacagtaattaggctttcgcactttggaggatggctccggctaagagaagcgaaatgcttctcgagtgaaagggctttttattatttttatttattatttatttattttttgtagaagtgtggtggggggagtggagggggttaccatgttgggcaggctggtctcgaactccagacctctagtgatcctcccgcctctgcctcccaaagtgctgggattacagacgtgagccaccgcgcctggccaggacttttatttgcgcttcctcttacacatggcgagtgagcgcctgagattcggagtgtctccttcgcagaggacgcctatggtaggggcttagtgtttgctgaattaaagggaatttgtcttcctaactttagattcgcaacacttcagaaccgaatgagagaccttcctccataaaattgactttataaatctttttcttttctttccttttttttttttttttttttttttttttgttagagccaaggtctcgctctgttgcccaggctgaagtgccgtgcagtgatcatggctccctgcagccttgaactcctgagctcaagaaatcctcctgcctcagtaagtcaccaagcctggctaattctttctttatttttttattttttatttttatttttttgtagagaagtgggtcttgcttggttgcccaggctaatctcgaactcctgggctcaagtgatcctccctcctcggcttcccaaagttgagattgtaggcatgaactatcacgcctggccttataaatctttattcatctttgcaaacttctaattatcagagaatatagtcaggtctaatccatcattttacaaataaagtgacttcctgacatcccccagctaaataaataataaatatataaataaataaactcaggtgccaaattgagaagcggtagaccatggtggctttgaaacgtattgtgtccccttggcgaggtggaactacgtttcccagcatcccctgtggatatgtttctggttagggtgggccacaggagacattctcatgcagatttgagggcgggagcgaagcagcagacattttgtggctcgtgttattgtttatctgctggtttacctccttggcttgggccagcagctgggcctaaaactgctccgccttcccccaagtccttctccagcgtttcctactcctaggctaggtgtgtactgaaggaacgcagctgcttctgcaggatggccatactatcaaggtcaaaggcaaagagaattgacacggttttagtttgcctttgtgggttccagctggtatttgcttttctctacgccttcctgactgcctttcctgacgtcttcaagctccaggatcagctgtgacgataacagctttacagggattgcttaagcagttcccacaattgtgtaagattatatgcggtatatatgatatataatatacataccctagtgggttctgctctgcttcaatctcttctgtgctagaatcctgactgattgtattataatgattttgtaatccggtaaatgcattatcttcttcggatttgcacttccgaaaacttttcattcagaatggtttgtggtggattaaatcaggggtgtccaatcttttggcttccccaggccacgttggaagaagaatggtcttgggccacggttaagataggctaacatttacgatagctgatgagctaaagaaaaaaaaaatcacaaaaaaatctgataatgttttaagaaagtttacaaattcgtgttgggccacaatcaaagcctgggccacatgcagctagtgggccgtggtttggacaagcttgaactacattgaagtcattattgctgtgttgcctgggctggagtgcagtggccattcacgagcacaattattgcaagctacaaccttaacctcctgggctcgagcagtcctgcctcagcctccatagtagctgggcctacatgaattttgaagaacaataaacttgatcagataaacagttcacgtgtgtaagcttttcacagttgcttaacataaaaattgctatgtggaccaggtgctgtggctcacgcctttaatcccagcactctggaaggccgaggctggtggatcacttgaggccaggagttcgagaccagcctgtccaacatggtgaaaacctgtgtctactaaaattacaaaaattacctgagtgtggtggtgcacacctgtaatcccagctactcaggaggctgaggcatgagaatccctggtaccagggaggtacaggttgcagtgaatcactgcactccagcctgggtgacagaacaagatcctgtctcaaaaaaaaaaaaatgctatgtgacaaactagagataacatgtacgtatttcttagatataacagagataaatgtccaaagagataaattttgttttccaactcttttttttttttttttttttttttttttttttgagacagagttttgctctgtcacccaggctggagtgcaatggtgcgatctcggcttaccgcaaactccaccttccaggttcaagggattctcctgcctcagcctctctagtagctgggattacaggcatgtgccaccacacctggctaattttgtatttttagtagagatggagtttctccatgttggtcaggctggtctcgaactcccaacctcaggtaatccacccgcctcggcctcccaaagtgctgggattacaggcatgatccactgtgcccggcctgttttcccactcttattatgtacccacaaagcaataaattgaacaagttgagtagttgcctctgagtggtaggaagtgatgaaggggtaggagtgaaactgctgcttttgctctaagcctttttagcattatttgacccctagactagttgcatggaatattttgataaaaaataaacattggttacaaaaacagttttaataaaagcaaaaaccataccacctatttgtatagggtgggcaagaagaaagaagataggaaaggttatcatttgagttggacaatagacttcagtactggagagtttccaatagaagttgaaaggaaggtcaggttccctccactattgtcctataaccctgccaaatccccctctgcgagaaacacccaagaatgatcaataaaaaaaataaataaaataaaataaataaaaataaaaataaaaaaataaaaaaaagaaaggaaggtcaggtttagggaggattatgaagctgtgagatttaaaaggataagagaatgagctcttccttctttcacagtcattttctacaaaaagaacatcttggcaacatagtctcaggctccccccctcctctccacctctctgccttctctttttatactgtatttattgtgctaactgaatctaaatctcagaaataattgaaacaatactttgaagcagctcctctcagagttgtgtttcatagacttgaggagtcttgagttctgggattggtatagtaatggccataaaaaataattttcacttaaaaaaaaatttggctagccacttggaggctgaggtgggaggatcacctgaggctaggaggtcaaggctgcagtgtgctgtgattgcgccactgcactccagcctgggtgacacagtgagaccctgtctcaaaaaaacaaaccaggctgggcgtgactcatgcctgtaatcccagcgctttgggagggcaaggtaggtggatcacttgaggttaggagcttgagaccagcctggccagcatggtgaaaccccatctctgctaaaaatacaaaaattagccaggtgtggtggcactgtacctgtagtcccagctactcggaaggctgaggcagggggaggttgaggcaggagaattgcttgaaccccggagggagagtttgctgtgagccgagattgtgccactgcactccagcatggggaaaagagtgagactctgtatcaaaaaaatgtaaaataaaataaaataaaataaataaaataaaaatcttcaatggcagaataattactagttataaaattacgtgatgtgagagagggtcccagcttaaatgccatttactacccatagtctttaggttcctttccatccttccttccttcctttctgcttttcttcttcccagataacaagctgagaaatttagagtctcgccctgtcgcccaggctggagtgcagtggtgcaatctcagctcactgcaacctccacatcctggattcaagccatcctcctgcctcaggctcccgagtagctgggactacaggtgtgtaacaccatgcctggctaatttttgtatttttagtagagatggggtttcaccatgttggccaggttagtctcaaactcctgacctcaggtgatcctcccaccttggcctcccaaagtgctgggattacaggcatgagccaccatgcccagcctaagtttcttgacaaagaaaattattaggatttttttttttttggtgtgttatgttgagggtgaaatgaacggatgaatggtagatgagttatccaaaatcagattgcatcagacaagccactgagaaataagaggaatctatcacttgctagttccttgtgtgttatgggtccactaactttttggctatatttcaataaagaaaacagaaagaactctaagatattcaccatatgttctataaaatgggtgcattgaaatatatgacaccagcttttccaggagcaatgctgcatggtgaggatctctcatctacgcccatagccatgtggtccaagagcctgctgcagtccatgcaggtctctggacagaggaagatgaccacagccatggcgggccgcaaacatggcagtggcctcatggaagtgaacaggcggcccctggagatgatggagtcatgcacactgcattacaagctgctggaaccagttctgcttctgggcaaggagcgatttgctgacgtggacatccatgtcctactgaagggtgatggtcaggtggcccagattcatgctatctgtcagtccatctccaaagccctggtggcctgttaccagaaatacgtgtggcttccaagaaggtcaaagacgtcctcatccaatgtggctggaccctgctggtggctgaccctcatcgctgcaaatccagaaagtttggaggccctggtgaccgtgcttgttactaggaatcctaccctaaagcccatcacgagttatcagtaaaagtccatcattgtgtaataaatacctacgtaataaataacgtttgagtttaaaaaactaaaactaaaataaaatatatgactcaatgggccagggagacagagtgctggggatttggcattaggagaactgtgggggcagcagcatccatggaggctgaatgaggtggggactgtgaatgacctgctgaaatatgaaaagaagtttccatctgagaaggcagcaggcttagtgtccaagagtctgcagtttgaaaacacatcatgcctggtgtggagcaagtacaatgatgttctccaaggcatcagcctgccaaaaggggctgctattcaaaagggggtaaaagacaaaccaaccaacccaacagggctctatacctggctgagggcactgccagcttctggactgtgaaaaggccctaagatacgtgcaagagctgccgtgggcagagaagccaggccaaggagctgcagaaaagagaaagcctctgtccttcctcctttccctcccctgttgtaactctcaaccatccccatctctgctcccccctcccaaatttagctcctcatcctcaggtccttgtgaattcctggttattaagaccttttcctacccccatgtttaaggcttttaagtctccttttaaatcatctccctccaggcaattccctctcaacatcctctcaccagcttagggaagccctcccgatgagatttaggagatagacaggtcacatgactatctctatgtggattatttctacataagaaaaacatccagtttggattgattcttaacagcattaatcttggagtttcaatttttcaaaataacgtatcaaattttgccattgttctagcatatggtgcaatataaaatggtcgaatgatatttatgcagggaagaaagatgaagtcaggaggcccactacgtggatccacttgtgtccccgtgtgaggtgatgaataaactaaggaagcccatgactgagcaaaggagctggagatgattatgggtcaggattgttggctcttttgatcagtgttgtttcagtttggtggcaaaatcagcctagagcccaggtctccaaatttataatttcatggtttccacgaagcacatgaactcaagtgagaaagaaaggtttcaattctgactctgcctcttacataagtatgtgaatttgcagaagttacttaacctctgaaactttccttatctgtgaaatggggaaatacttgctgggaggattaaatgagctaacccagcaaagggccagacagagtttaatgaagggtagccttctccctagctccttagtgcttgcttgagagctggaacaaaccataaggattgcacaactcccaaattcccagatcacatcaaggtggccaaatcttaagaggaatttaagctcctaggcttaaattttgcttggcttaatcatactattcgctatgctgggataattctccaaacctctctggaactgagttcattcctctgtgggatgaagaaataacagtctatacccttgagacacaaggttagataacagccaattaatgcttacaaagtacattggtatccaaggatgaaagtgcaaagtcaaaacatattttcggctgggcttggtggctcacacctgtaatctccacatattgggaggccaaggcaggcagatggcttgagcccaggagtttgagaccagcctgggcagcatagtgagaccttgtctctgttatattttaaacttaaaaaaattttttgttttaatttaggcccggcaaggtggctcacacctgtaatcccagcactttgagaggccgaggcagacggatcacttgaggccaggagtttgagaccagtctggccaacatggcaaaacctcacctctactaaaatacaaaaattagccagacatggtggtgtgtgccgtaatattccataattcgacacagatgattagggcatcttctgctcttttgactaagagtcaatggctctgttctcccatcccactttctttccatatcctttttcaggtgttttaatatctaatccagaagaaacatggatttccattttattaacactcataaatttaactattgtatatgttattccaaaaatgcacaagaaagagattatttgtaatggaaggaatattggattttgagggagctgatgttcattctcacccttgatttgccatttactgacaatgtgatcttaggtaacctaagttcttgttagcactaaaattttaggaaatgcaaatgagtctatgaaagggaaatagcttagctgaaagttcacttccttcccttttctaattgagaaattgaacacccttacagtaacattttaatatagacccaaaactgaaaggagatcttcattttaattctcattttttatcttagtctggtacttggcacatagtaagacatcagtaaatattcagtgaatagagtggcttctcatgaacatgagaccaagaagaagaatgtttcatcatgtaagaactcaattcaaagagaattaactaagcatctgctatttggcagctgtatttgccaggcattctaattttttatctttcataaaaattgagatgaggctgggcgcagtgtctcacacctgtaatcccagcactttgggaggctgaggtgggcagatcatgaggtcaggagtttgagaccagcctggccaatatggtgaaaccccgtctctactaaaaatacaaaaaattagctgggcgtggtggcgtgtgcctgtaatcccagctacttgggaggctgaggcaggagaattgcttgaacccaggaggcagaggttgcagtgagccaagatcatgacattgcatgccagcctgggtgacagagcaagattctgtctcaaaaaaaaaaaagtttaaaaaaattgagatgaatggatatgacctctgtcttccattaacttatgactttggggagagataacatgtatacaaagttcagtgtaataggaaaagtgctgggagtcttgcaaggaaaaccatgcctcatcctcattttatcactaaccagttgtatgaatgtgagaaagttatttatacactaagacaatagcttcatcatctgtaaaaggtaatactacatgatctggcctctaaggtcatttctagctatgagtctgaaaatgattctatgcctctgaaacattagtttaaatgcctgttcttaaaaactcctaaatatttattgaagataacctcttcaatacacttatttttccatctgcaactaataagcaaagtcacacaaaacagtagtgcttacttctcttggaggatacttccaagaccctagtagatgcctaaacctgcagatagtactgaaccttatgtatactatgttttttcttatagatacctatgataaagtataatttataaattaggcacagggctgggcgtggtggctcgtgcctgtaatcccagcactttgggaggctgaggcaggcaggtcacctgagatcaggagtttaagaccagcctggccaacatggtgaaaccccgactctactaagaatacaaaaattagctgagcatggtggtgcacgcctgtaatcccagctacttgggaagctgaggcgggagaatcgcttgaaccccagaggcggaggttgcagtgagccaagatcacccagcttgggcaacagagtgagactttgaaaaaaaaaaaaaggaatctgaaaaaaaaaaagaaaaaaccaaattcagtaactaaaacaatatggaagattaaaaagaactgaaataatgtggaggagtcagtcagaagttccttagcctaaaaaaaatactatgacctatattctagcaagtaaagatagcaatagcagatcttggattcaaatccattgtaccaggacaagactggctggcaggggtgaaatcttgaggagagatagcctgtgacctgtcactaggactctctgagacccttgaagaggattcaaattccagcccatgtcattgcaccagaagtgggaaacagctgactaaaaagcttgccaaaaaagccgggcacctggagataagactcaggaagcgttttccaaacaagaaacaaaagagtgaaggaggaggccacgaaagagaaatcctggagttgtatgcagttggtgaaggatcattgttttcttcctcgcaatctctgtggaatggtcacaggcaaaaacatcagaaaatgaaagtgcagagctctattagaggaagaggaaaattattgataggaggaaaatctccatcatcgcatggaatattccattttacacagatttcttctgaaggtcaaggactgaactaaaggacacagcctgcatgtaactgccctgagtttgggggtaaggagaggagagggagctgggttatctcatcagtgtgtataggaaatccaacagagcaatagagatggggggcctctgcttactctttttttttttttttttttttttgagatagggtctcactctgtctcccaggctggagtgcaatggcacaatcatggctcactgcagccttgtcctcctgagcttaagcgatcctctcacctcagccacccaagtagtagctgggactacaggcatactaccataccagactaattttttaaaaattttgtagagatgaggtgtcatgttgcccaggctggtctcaaactcctggactcaagtgatcctcccgccttagcctcccagagtgtcaggattacaggcctgagccaccacacccagccccactgcttactctttcagatataatttcctgtaagcctccagcattctggcccagacacagatgcagaaacatctagactggctgcaccattttccacactttgagcctttttgggtacagttttaaactaagatcaaagtatacatctttgaaaacccaatactaatattctgctcaaaccacattgtcaaaacaccccacacaaaaaatgtgaaatcagggaaaaagtgaaaaataagacagcagggtaaaaatgggggcactattagatatttcatccccagcaagactaccaccgccaaaagtggttgccttcagaattttcctctgggtcctcttatttttccagcatttccacaattacaaagatatctattactatttattaatgtacatgcttatgtgtataaattgtacttgcccagctgaatcctgggcaaattccatatcctttcattctagaatcccagacttagtgccacaaatcccatgatttgaaactcctggcctagaatccaaaccctgcataattttgtatgcatccttagacttagcatggagaagttgtaaaaacaatgcaatagcagagaggtccaaaaagcaaaaataagcaactctcctattgcttaagcaatgcatgctgtgcaaggcatttttaattgttttttgtttggacttggtcaggacagagtcaaaacagtatgataggcttttttttttttttttttttttttgggagacagagtctcattctgttatccaggctggagtgcagtagtgccatcttggctcactgcaaactccacctcccgggttcaagtgattctcctgcctcagcttcccaagtagctgggattacaggcacccactaccatgcccggcaaactttttatatttctagtagagatggggtttcatcatgttggccaggctcgtcttgaactccggacctcaagtgacccgcccacctcagcctcccagagtggtgggattatagacgtgagtcactgtgcctggccatatgataatcatttttatctttgagatttgaccacactaggaaacaataaaatattggcattgtgtttgttgagtttggttttttggtttttgggcttaaaaaatttttttttttggtggtagtgggcttcattcaattctctgttacagaatttattagcttttctattttattcatgtgtggttttttctttattttctttattttttttaaagacgaagtctcactgtgttgcccaggctgcagtgcaatggtgtgatctcagctcactgcaacctccgcctcccaggttcaagtgattctcctgcctcagcctcccaagtagctgggactacaggcgcccgacaccacgcccagctaattttttgtatttttagtagacacagggtttcattacgttatccaggctggtctcaaactcccacctcagcctcccaaagtgctgggattacaggtgcgagccaccgcacctggcatgtggcttttgttttaagtaaatgttgctttcttttagttataggaaggggatatttcctttcttctgtcaccaaaatataggttcaaaaataagaacctgcaggaatccttacgaattttaaatttatttagaggtttgtctgcaacttcagagctctatatggatgcatatcctgatagcaacccacttgaattgctcaacaaaaagaccacagttgtgaactggatacattcatggtatcaagggaaatatacctgtaatgtctataggaataatgaaaagttaattataggagaagcccagtcctccgcgatagtaagtattgtgaagaaaagaaaaatgttcaatgccaaatgaagtcaaagttacctacagtgatgtagtaaaaagtgtttgtttgttttttgaggcaaagtcttgctctgttgcctagggttgagtgcagtggcaagatctcggctcactgcaacctccatctcctgggttcaagcaattctcctgcctgagcctcccgagtagctgggactacaggcatacaccatcacacctggccaatatttttgtatttttagtagagacagggtttcaccatgttggccaggctgttcttgaactactgagctcacataatctgcccgcctcagcctcccaaagtgctgggattagaggcatgagccaccactcccagctaatttttgtatttttaatggagacagagtttcaccatgttggtcaggctggtcttgaactcctaacctcaagtgatctgcctgcctcaggcaaagtgttgggattacaggcatgagccaccacttggctgaaaaggttttttaatacaggaaaacattattttatgataggaaagaaaaggcaagacacaaacttttaaattgtaatctactccaaatgctaattatttccatatgcatagttatattcactccccctgaacaaacgaatgtgactattgttccacctctttaatgcttctgcacctccctgttcatataagaaaatggtgtagaaaaagcaaaggtataactacatgaaaagcctgcctgtttatacaacattttgctgagatgtgagataatagcatgatggaggatgcatatacagttacatatacaggttgaatatctctcattggaaatgcttgggaccagaagtgtttcagatatcagaatatttgcatacacataatgagctatcttgaggatggcactaagtctaacatgagtctaaacatgacatttatttatgtttcatatacatcttacacatagactgaaggcgattttatacaatttttttttttttgagatgaagtctcactctctcacccaggctggagtgccgtggcacgatcttggctcactgcaaccgccgcctcccaggttcaagcgattctcctgcctcagcctcctgagtacctgggactacaggcatgcgcccccacacccggctaatttttgtagttttaatagagacggagtttcaccatgttggtcttgaactcccgaccttgtgatctgcccaccttggcctcccaaagtgctgggattacaggcgtgagccaccgcgcctggccttatataatatttttagtaattttgtgcacaaaacagagatttgactgcgcaaacttttttttctctttttgaggcagcatctcactctgtcacacgaggttggagtgcagtgctgcaatctctgctcactgcaatctctgcttactgcaatctctgcctcccaggctcaagagatcctagcacctcagcgatcgaccccagctaattttttgtatttttggtagagacggggtttcaccatgttgcacaggctagtcttgaactcctgagctcaggcgatctacccacctcagcctcccaaagtgctgagattatggctgtgaaccactttgcccagcctgtacaaacttttgactgtgacctgtcacatgaggtcaggtgtggaattttccacttgcagcatcatgttggaattcaaaaagctttggattttgtagcatttcagattctcagattagggatgctcagcctgtatatgtatatgtgtgtgtgtgtatatatctcaggataataaatgttggtaaaaattatgggtaaattggccttaacaaataactatataacagtgatgttttttgaataattcaagaatgagattcaagagaatgggattttagtggttgggtcagctttgtttttgaaatgaatgctttctagaacttttgtttattattatttatttttatttatttatttttgagatggggtctcactttgtctcctaaactggggtgcagtagctcaatcacagctcactacagtcttgactttaccaggctcaggtgatcctcccacctcagcctcctgagtagctggtactacaagtgcgtgccaccatgcccagctaaattttttgtattttttttgtagaagcaaggtttcaccatgttgctaaggctaatctagaactcctgggctcaagcaatctgcctgcctcaacctaccaaagtgctgggcttataggcatgagccatcatgcctggccttttatttattgtttcaattgtacatatacttaatgttatttcacagctttttgccaaccctctattttctatgagattttgatctttcagttttgcagttagctaggattactatatataaaaatagtatttaacacatatatagtactctgtgtcaggccctgttgtaaatactaatcctcaaaactgtgaagtaggtattattactatccccattttctggatgagaagactgaggcacagggaggctaaattatttgtctaaagacatgacattactaatacaactttttaaggggaaggaaataacaccaaggtgtcaatggtggtttttcagggtgtggggttataaaggattgttaagaggattgaaatgacaagatcttgaactaagcccatggcagctgagctgggacagacaggacagactctagaacagtttaagataaaatattggcaagccttgtggattggttgatttcatgttgggatgaggcatagcagggaagctaggaagactcacctctggcacctgtgactgggtggacatttcactagagtaggaaatacaaaagatggagcagactgaggagaaatgatgtgttcagttttgacattttgagttttattgtaagcatttgaacatgtaaattttaaacttaagacaggccgggctcagtggctcatgcctgtaatcccggcactttgggaagccgacacaggtggatcacctgaggtcaggagttcgagaccagcctggtcaacatggtgaaacactgtctttactaaaaatacaaaaattagctgggtatggtggtgtgcacctgtaatcccacctactgggaaggctgacacaggagaactgcttgagtccaggaggcgaaggttgcagtgagctgagatcgcgctgttgcactccagcctgggtgacaaagcaagactccgtctcaaaaaaaaaaaaaaaagacggaagttagctctcaacttgagggtcttcacacagagctggtatttaaacccaagaaagaggttgccatcacccagggagactgcgaaagaaggaaaaaaaaaaagctgtgggccaaggacagaactctagagaaccccaacatctatgcgacatgtagggaataagaagccccttcagatttgacattaaagtagcaaacacagatatgaaatgccaggtatatatttgcttttcaagctaggtttcatttatgagaggcaaggtagcatggaagcagggcagtcaaacaagtctgagttcagatctagcccctgcagcttactctgtcctgtggcttctcaggttactaagtgtctatgaaatgtatgtcaatacactgtatgtgcactccagccagggcgacagaatgagactccatctcagggagaaaaaaaaaaaagaaaaagtcatcacaataattcactgatggacactcaagaactggtatttcccatgaatttgtatggtatagtacaagtaacagggataatagcagttggttaaaagaattaactgagatggatataaatgttggtatatgagctacaagactgcattaaagtttttctgtaatgtatgtcaatacactgctcatatgttgtgagcatgaaatcggttaatccacagaagcacttatatggctcagtgcttagaagtatctattactaatgagtacacaaatcataaaattatttttcattccattgtcatgctttgccagttgagaaaatggccaggaagtctgttggcttgcaggaataaactaaaatagaaattaaacaattgtattaaaaagtctggccggggtggctcacgcctgtaattccagcactttgggaggccaaggcgggcagatcacttgaggtcaggagtttgagaccagcctggccaacatggtgaaatcccgtctctactaaaaatacaaaaatcagccagccatggtggcgtgtgcctgtaatcccagctactcggaaggctgaggtaggagaatcacctgaacccaggaggcaaaggttgcagtgagccgagatcgtgccactgcactccagcctgggcgacagagtgagactccatctcagggagaaaaaaaaaaagaaaaagtcatcacaataattcactgttggacactcaaaaactggtatttcccatgaatttgtatggtatagtacaagtaacagggataatagcagttggttaaaagaattaactcagactgatatgaatgttggtacatgagctacaagactgcattaaagtttttcttttgttctactctaaaaattcagcaactaggcccagtgcctgatacagagtgagtcctcaagatatcgttgactgaagctaacaaagtgatttattgatttatttatttattgagacagagtttcactcttgtcacccaggctagagtgcagtggtgcaacctcagctcactgcaacctctgcctcccggtttcaagcaattctcctgccttagcctccagagtagctgggacttcgccactacgcctggctaattttttgtatttttagtagagatgggggtttcaccatgttggccaggctggtctcgaactcctgacacccgcctcagcctcccaaagcgctgagattacaggcgtgagccaccgcccccagcctaacaaagtgatttttttttaaagacgaggggcaggcagggcgcagtagcttaacgcctctaatcctagcactttgagaggccgaggtgggcagatcacaaggtcaggagttcaagaccagcctggccaatatcgtgaaaccccctccctactaaaaggatgaaaaaaattagctgggcgtggtggcagccacctgtagtcccagctactcgggaggctgaggcaggagaatcgcctgaacccgggaggcagaggttgcagtgagccgagttggcgccactgcactctgctctgggagacagagcaagactccgtctcaaaaaaaaaaataaataaataaccaaaaaaaaaaaaaaggaggggcgatgttttattaaacatttcgctatttgaagaattaatacactcatgcaaagaaaagatgaagtaaacatgccctacagtgttatcatttgagatctcttaaaagcggctatgcagccgggcgtggtggctcacgttgtaatcccagcactttgggaggctgaggcgggcggatcactcgaggccaggagttcgagactagcctggccaacagggtgaaacgccctctgtactaaaaatacaaaaattacccgggcttggtgtcacatgcctgtacaaatcccagctactggggaggctgaggcaggagaattgcctgaacccgggaaacggaggttgcagtgagccaagatcacgccattgcaccccagcctgggagaagcgagactccgtctcaaaaaaaaaaaaaaaaaaaaaaaaaaaagcggctatgcaacactctactctgtcccatgaatatctgccacatatttgaattcccagtcttatacgccccaggcctttgcaatgtttagggtccacacgagaagccattaaaatgcaaatacgtcatctgtgaccgggaaccaagctggcatctagcagatactgacacatttatcagtctgatgtgtggacaactaggtgcctcccagaggccttcaggtaaggtggaggaagggccaattctgagctgacacagtgggatccatcttggccaggacagtgggatccatcttggccaggacaaaggcagtccagagaggccccgcggcgcggtgcggcgcgatcacgcccgagtctccttctcgttcccctcggcccttcctaaaacctgctggctcaggtctgaacaatcgcagctggacaggtggtgcacaacgatgttaattttcatcctgtctttttcatcagtgcatccttcagttccctattacttgtgggctggggagttggccaaattgagtgaaaacctgaaatgtctttttgttcttttggttcagccagtttaagttccatgcaatctttaagctaggaggctaataataatacaattctctgcttgcccttttcaaagccacttcagcttataaactccatattagaccatccaggcccagaagacgccaccggcctacaggcagagtcagcggaaccagcctgggctggatctccccctgcgaggcccccaggcaacgcccgcgccgggccggggagatcacgtcccgtgcgtcgggaggcgggggcctcgggctgtgacgtcacgtggccgcgcccctgccgcccagatatctccggcgccgcccgccattttgactccagtgtctcgtttgcagtcggcgctttaggggaactgtcttcctccgcaggcgcgaggctgggtacagggtctattgtctgtggttgactccgtactttggtctgaggccttcgggagctttcccgaggcagttagcagaagccgcagcggccgcccccgcccgtctcctctgtccctgggcccgggagggaccaacttggcgtcacgcccctcagcggtcgccactctcttctctgttgttgggtccgcatcgtattcccggaatcagacggtgccccatagatggccagctttcccccgagggtcaacgagaaagagatcggtgaggattgggaccgtgggtgggcgcatgagggccgaggagaggcagggactccccggaggaggtttgggaggaagcgactccaagtctgagggaagagctccagtgcgccagggccagcccactagcgaggaggaggaagccgcctcggtgggagttggctgaggggtaaacggcaccgacgtggatgcagcacctactgtgctccctcgcggttgctgtgtggctggggcgggcaaggaccccggtttcttcgtcggaggtccgcgcagggctcttgtcctgggagttcttggctcagggcatgactgtcgagtggacagggaagggccactcagggactttaggtttacaatggggaaaagtaaacttgtgggttgtaagcggtaatgaaaggagggggtcctcgtgtgtaccaaccactcttagatagaaatgagatggaagaggtcccaacagcctggcaaaagcaatacagtatttttaaaatggtgtggccttaagaaacgcagcggttcgggggaggagacttttagaattatctttcaaacacttaagggaggagctgggtggttgggtggagtgacagaaggaaagcttttgtgcggaagaggaaactctggaaaaggcttttctggcttagtgtctagccctggtcggcttagtaaagggcaattagtgttgaaggttgtgcgtccacacctacttagtggctcagtggaaagcacgtcgcattatttaaatcctcttttaaagtaaaataactggaacaacgtttgacggtgttggggggtgctgtacattggctgataacacttagcaaacactgatcttactgtgtgaagtaataattagctgcggccgctgagcagagagcatttacattttcctactcttgaagtgaatgtgtgcctttactaagtacaaggaggagttatttctagagaagggaagaggctgaagtagccaaaacgcgcactattttgtatgtgggtgaatttttatatctagaaacagctgttttagaattctggacttttgttgtcttagggatgattgattaggaagggactttaaccctggttttaataaccatttttaaagatacaaacacagaaaaaaaagggaaaaaattgtagcagagttcacacagaaaaaagaaaaaaaaagatgcaaagaacacagaatttgtgtccagttattattttaactgtattttaagactagaaagtatgtcgcgaagtgggacaaagaactcaaaagttcttatcagtccagtgggtttttcttttactttagtacaccataatgttatagacgagtgatctgccttttttttaaatctgtattttacttcatcctgataaaccattttgaaaactttgcggtcctgttttctctctctcttttttttttttgagatggagtttttgctcttgttgcccaggctggagtgcaatggcacgatctcggctcactgcaacctccggctcccggtttcaagcgattctcctccctcagcctcctgagtaggtgggattacaggcatgcacacgcccggctaatttttgtgtttttagtagagatggggtttctccatgttggtcaggctggtctcgaactcccgacctcaggtgatcgcccacctctgcctcccaaagtgctaggattacgggcgtgagccaccccgcccagatttccggttttgttttctaagagatggatagagatggatagcatacctacataaagtagaaccatccactaagtgttcccccactagccccctgatttctcttttcttttctttctttttttttttcatatttaggtctcagtgttatttcctggatacgttataaaaacttactagctaagtgccagatatctagaagaacttttgctttttctgagctttttttaaccccagtttttttctttgtttctttttttgaattatcatttggatacaaggttgaacatttctctgcgtagctttttaaatctatgaataaggatttactttttttcttttcttgggtgttaattaaaagccaagccaagtttagtttctcaaggacatacggagagtagaggcaagatttccatgaatgattaaataattctgtgatactactgccttgagctactgccctttttcacaaggcactgccacagatcatccctttctggttatgaaattttggggaggaatgtaaagaaggagctaaatctggtttgcttggttcagcagtgactcagatggtatgttactgttttacagatattaataatgtagtgttgtatcttacggctgatttcccatggcagcctttcccttaataaggtcattaaatcatacatttctgttgctaacattaaacagttacagataatgtaataaaggtttaacttaaaaattttttttcaaagcactttattacaaactttgtgctaggtttataaaattgtaccagtatttaatctgagcacttaaatcattttattaaagtgccaaaggcaatttgatatacctgttatccagcaaagaaacacaaggcaattattagtaaattttaacagattaatgcatttatttggtaggttttataatggctctatttcttgagtttgtatatatttgagaattatgttataaatatgttattatttcattgtctttgctatctatttgaaccaattttttagtaattgttaccgctcttttacttttttttttgttcctttgagactgagtctcgctccgtcgtccaggctggagtgcagtagcgcagtctcagcttactgcaacctccacctctcgggatcaagcagttctcctgcctcaccctcccgagtagctgggattacaggttcgtgccaccacacctggctgattttttgtatttttagtacagatggggggtttcaccatgttagccaagctggtctggaactcctgacctcaggtgattcaccctcctcggcctcccaaagtgctgggattacaggcgtgagccactgcccccggcctactctttttttttttttagacagagtcttgctctatcacccaagctggagtgcggttgtgaaatcttggctttctgcaacctctgcctcctgggctcaagcaattctcccacctcagcctggtactacaggtgcatgccaccacactcgctaattttttaaattttttgtagagatgaggtcccctatctatcccaggctggtctcaaactcatgggctcaagtgatccatccaccttggcctaccaaagtgttgggattaccagtgtgcctgtcctattaccactatacacaaggagttccatgattgtggtcaaggtagaagaaaaatatagagtaaccttaaaatacagtctaggctgggcacggtggctcatgcgtgtaatcccagcactttgggaggccgaggtgggcagatcacctgaggtcaggagttcaagaccagcctggccaacatggtgaaactccgtctctgctaaaatatacaaaagttagctgggcgtggtggtgggcatcatgatggtgcatacctgtaatctaagctactcgggaggctgaggcagggagaattgcttgaacccgggaggcagaggttgtagtgagcggagatcatgccactgcactccagcctgggcaacagagcaagcctccgtctcagaaaaaaaaaaaaaaaaaaaaaaagtcacgtatgaaaaatttaagtcttgcttatgcttgctaagggagagcttaattttagtctcatttactagatgttcttgaaattgaatgcaagggctgttcctcgtatacaagttacataaatattctccatagagacttttaagttgaattttaaaacttgcttcccttatttgtgaacttagcatttttttcctcctaaaaatgcttgtaaaatgtttttaaaatgctttaaaaatgttttcaaagatagatgtggttaaacaggaatccaagttaaaaaaaaagtgtgcctgatgcagtgggtcatgccttaatctcaccgctttgggaaaccaaggtgggaggatcgtttgaggccaggagctggagaccagcctgggtaacatagcaagaccctgtctataaaaaattgtttttttgccgggtgcggtggctcacacctctaatctgagcactttgggaggccgaggcgggcgggtcacaaggtcagtagttcgagaccagcctggccaacatggtgaaaccccgtctctactaaaaatacaaaaaataataataataattagccaggcatggtggtgcacgcctgtaatcccagctactcgggaggctgaggcaggagaattgcttgaacccaggaggcggaggttacagtgagccaagatcaagccactgcactccagcctgggcgacagagcaagactgtcttaaaaggaaaaaaaaaagtttgttttttgtttttgtttttttcagttagccaagtgtgggggcatgtgcccgtagtccctgctacagctactcaggaggttgaggcaggaggatcatttaagcctacgagtttgcctctgcactccagccttggcaacagagcaagaccctgtctaaaaaattaagcaggcaggggttgcaaattcagaggccaggcatataaagaaccctggtaaaaggaacaaataaggctgtaggtttgggaaaattgtaaggaaacctggagcagcatgctctttctgaaatcatttgtatgttaaaggtatctgcaggcatttgagggtcaccaagtttgtgaattttgtattaagaaagttatgtggctcacatctgtaatcccagtactttgggaggctgaaggtgggaggatcacttgagcccaggagtttgagaccagcctgggcaacaaaaggaacacctacctttacaaaaataaaaacattaaccgggtgtagtggtgcatgtctgtggtcccagctacttgggaggctgaggcaggaggatcgcctgagcctgggagttcaaggctacagtgcgcagttattgtgctactgcgctccagcctgcatgacagagcaagaccttgactcaaaaaaacaaagttatgtgacggctagtaaagttaatgtcatcttatgctgtgctaatatggggtgggtgggggactctgctgctttgattaaaccacacctgaagtattgtggttagttctgggtgccacttttatgagggccagtactaactagaatttatccagaaaagtatgatgaagttaggatgggaaatggacttgaaaccatgtgatctaaggtatgattgaaaggatagagatctcttagcctggtaaaaaagattcattgatggctatcttcaatatataaatgccatatgaggatagcagcaggcttattctcttaggtcagaatcagtactgagtgggtagagtggtaggaggaagattttgagtcattaaaaacggtctcagttgcaccaaaatagtgtaagccttattatgaatatcatagaaaagtaggtctcaggctttttgtttttgctttctaaaccacacctatttgttaaggtgtcaagaattgggcagataacatatttaaatcactttagaatgggagcataaatgtgtgctttcatattcattccgtaaatatttactgagcacctgtcatatgccaggtgctatactagctgttgatggagcatacattcaggctgaagaagtacattttgggggtgggtgtgtccatgtccaggttctctagctatatcagtgtaaggggttcttatgtgaacagcaataacatagaatatattaaagcttaggtgttggaaagtttaaaccagaaatacataaaaatatattattatacagtgtacaattgaccagacaactgaccacaaaataggtaatagggaaaattaagaccaacccaaaataggtgatacactgataaagaggctcctttccccaaattgaggaaattgtagctgagtttgcatgcatgcattgcagtatgagcttgttgatcatgctttttgttaaatatggaagtaatattctccatatactctggtaatatgccaatttttgttaggaatacaaaatttgagtaatctgaatttaaaatatatgacattgtccattttttgtccttaaaaaccaaaataattccatttttgagtcagtttgaggcctattaggaagactcttaaggaccagtatttgagaatcacaaatataatgcattttggttttttttgtttttttttttttatgacagtcttgctctgtcacccaggctggagtgcagtgatgcagtcttggctcactgcagtctccacctccaagattcaaacagttcttatgcttcagccttccaagaagctgggattacagacacactccagcataccaccatgcccggctataatgcattttcttttattttagcttattttttttttgagatggagtctcactctgtcgcccaggctggggtgcagtggcactttcttggcttactgcaacttccgcctcctgggttcaggcaattctcctgcttcatcctgggattacaggcgcccaccaccacgcccagctaatttttgtatttttagtagagacagggtttcaaaccatgttggccaggctggtctcaaactccagacctcaagtgatccgcttgtcttggcctcccagaatgttgggattacaggtgtgagcaaccacacgcggcctataatgcctttttaaagcactggtttggagggttggactagacaacctgtaagtctcttctagttctgagggttttgtgatttttgtgacctgggcctgaaaagggtaaaaatacttgtttggatagtgtattttgtagtgctttcctttgagtaatggtgtaatattgtattttatggtgaggtatggtttttgaaagctaagaaacttaatttggaagatacttttcctgccaactaagtttaatttcttgcattttaaatgttaataatttgatgagaacgtaatacaatgcaaaagttaggacttttgtaattgttaggtctaattggtcattacattattattgaccagttttttttacggaaactttcttaaaaactcttgcattgggaaattttagggaaatcactttatcaaaacttggagatagtcattatcgttaaggggtcttcatatactgcataccccccgttagaggatggaatgcagaactcactataccctgtctgcatagaagagggaagaaactcaatcccaaagtaatatggaagcagtctcacatgtattgttggttatatatgatatccagtatttttatttttccttttagtgagattacgtactataggtgaacttttagctcctgcagctccttttgacaagaaatgtggtcgtgaaaattggactgttgcttttgctccagatggttcatactttgcttggtcacaaggacatcgcacagtaaagcttgttccgtggtcccagtgccttcagaacttgtaagactgttacttttctgtattttgtatctgtttgtggaatttaccattttctctcagtgtagggtaataaaaacattttgatatttaagttttactttatagatgatgtcgtgagttttaatcatgggctgaatatatttattggaaattttgtgtaaagaattctttgggccgggcgcggcggctcaggcctataatcccagcactttgggaggccaaggcaggcagatcacttgaggtcaggagtttgatacccgcctggccaacatggtgaaaccccatctctactgaaaatacaagaactagctgggcgtggtgtggcacacctgtagtcccagctactcgggaggctgaggcagaagaattgcttgaacccaggagccggaggttgtagtgagtcgagatagcaccactgcactccagcctgggtgacagagccaaataatgtctcaaaaaaaaaaaaaaaaaaagaattgtctggtgttatttatacattaagtttttctgtatgttaaaagtcagattgtgtctaacaagtgtatatatatatatagtgttgtgccagagtaggtgacttctgtgatgtgaagctttttggattcactttggattttacattttgttggataaccctggtgcatagtagtagagacaggggtttcaccgtgttggccaggctggtctcgaactcctgactttaggtgatccaccctcctcagcctccctaagtgctgggattacaggcgtgagccaccgagcctggccctttgttgttgttgttgttgtttttgtttttaatggacttatagtccctctgtttggggtaaattgagtttggatgtttgttgaaagtttttctaaaatgtatcatgtgctatattggatctttccctgttttttttgtgtctagcagaccttcatggttatagtcactaatgttctcattacatataacttgaggtctggaacctatgggaaactgatcattatggtttgaggatttttttccccctttaaggcaattttctgatatcagcttgaccatatcttaagttactgggtttttttgtttgtttgtttgttttttgcttatttatacttgtgtttttaggttgaaggagcaccagttgattcggtggttttgaggaaaatttgggaggcaaataagttataatataaattgctttattgttgaacttactactcagtcactgagaatttctattaatgtccttctctcgtagttcaaatatcaacctttcccttcctatctataggattctattgttatttggtgtcattataataatattgaggttattttaacaaacacttgtaattattcaatgtccagaggagtccagagtgaataataatacaatttccatctgacttcccccactccagtctcttgcatggcaccaagaatgttaccaattcaagcagtttaagattgccaagacaaaatagtgatggtggtcagaaaaataagcctcgtgaacatattatagactgtggagatatagtctggagtcttgcttttgggtcatcagttccagaaaaacagagtcgctgtgtaaatatagaatggcatcgcttcagatttggacaagatcagctacttcttgctacagggttgaacaatgggcgtatcaaaatatgggatgtatatacaggtatggattcatagtttttaaagcaaatgtattattttatgatgcagggcactgcttataggcactggaattgggatttgaggatttcagcttactgaaaagcaagaattgatggcataggtgcgtctttataatagacctgaatgtcaccttcttcagctcatgattttaatttaggaaaactatggagttcatattgcttcatcactctttagagagtattacagtaggaaagggttttccagggaatgtttagttagttgtcctttataaactagttatttagttaatgactcacatgtcaaggtgttttctttgtttatgctttttcaatgattgatagcttagaggttttcgaggtaaatcagatttcagtaatcatctcaccttggaaaggtttagtgaaagtttagatagattgagaagttaaattctttgggcaactagaaataaatgtgttgcttattgcctaaaacactttctggcatataatatgtactcaaaaacataaaggatttttaaagaagcattaaaagaacatgtacattagaacataacaagtgatactaacataggtgataatgagtcaaaatttgggttcttgaaaaaaacaagatgaacacatagattgtcttagaaaacaaagctcttacattattagttaaatacattttttttcactgggatcatgtttgaaaactaaagttgtgggataacttgtatcttttgaggagcttaacattcctaggccagggaaataacaagcaaagaaataatttgattttatattttaaagttcatgcctgtaattccagcactttgggaggccaaagctgggggatcacttgagcccaggagttttagaccagcctgggcaacatagtgagactccatctctccaaaaaaaaaaaaaaaaaaaaaaaaaaaaaggccagccgtggtgacttgtaactgtagttccaactatttcggaggctgaggtagggggattgcttgaacccaggaggtcgaggctgtagtgagccaagattacgccattgcactccagcctgagtgacagagtgagaccctgtctcaagaaaaataagaacaaaacaaaaatatattaatactgtcttttttttcccttttctatcatatttaggaaaactcctccttaacttggtagatcatactgaagtggtcagagatttaacttttgctccagatggaagcttgatcctggtgtcagcttcaagagacaaaactctcagagtatgggacctgaaagatgatggtatgtcttttttccaagctatgaactaggatttgtttcttgatactactatggagaggtattgggaacatgtggggcatttgactttaaaaatgacatgtgatcaaagttccttttctctgccttaacacttaggttcctttcctgaatagatcaaagaaaaacataaatgtgacccagaataggagccaacagttattcgaagtaaatgatctgatattattcagaaactaaccacataaatctgtatcaactatctgaggaccaaatatggatcaggtttgggattttacaggaaccagtctgtgtttatgtcctcttagggagggttattaacttactgtattggctgagtgaaaatttaggtaggtcttgaagtaacttagtatctaataaaatttaaattgaaacatgacctacataccagaacttataacatgtgaatattagtaaacgttaaattggctaggttaagaagtgcttttataaaaagtgaaagatttactgtccaatacaatagaaagatacgttggtgtcaagtactcacctttctctaaagccttacaaagttttggagatgctacctcatttgagatgagcatctcttccctttctcagtccctaatgaaagagtttatatgtttaactaaaaccttaaatgtaaggtctgttggtgctctaacagcctcaagctggaggttaacaggcttgcctaggggtaataaagcttaaattgaattagtaggaaacaaaaccctcagatctggagatgttccagctgatagatagtaaccattccttaataaagttctatgctaacattaacaaatcatgaaggaccttctctgtgttttatctgctcagctgttgaggtgcaaagggatgccaacagttgaaatattttaataatttttttattttgcatatcgaatgatgcttgcttatctcaaactaatttcagcaatgtacatgttttaagaacatagtcttagtaaaatataagctccaagatagtggggtccttgccttatttccagttatatcctcagtgccggcatagggcctggcatgcgtaggcactcagtaagtatttgtaaaactaagagttcagtatacttaagcatagttgtgtgctgtgggtataatacacaaggactttggagtgagttgtaggttctcaaaaatgaagaatgaaaaggcattttgaagatggtcaagtttcttaaccttgctgttgtgttccagttgcttaacttttaaaataaggggattggactaaaagaattctgtcttttttttttttttttttttttttttttgagatggagtctcgctctttcgcccaggctggagtgcagcggcgtgatctccgctcactgcagcctctgcctcccaggttcaagtaattcttgtgcctcagcctcccaagtagctaggattaccggcatgcgccaccatgcccggctgattttttaatgttttttagtagagatgggtttcaccctgttggccaggattgtctcaaattcctggcctcaagcagtccacctgcctcagcctctcaaagtgctggaattacagacaagagccaccgcgccaggccccagactttttcttgaagggctagatgttgaatatttgaggcttgtgaaccatgctgtctgctgtagagcacaacataaacacatggacaggattgtgttccagtaaaatttaaaacctaagcagctggtgtatatcggtaacccttgttatagataaattgctttcagctataaatgtttgtgatcctttgctttactgctgttttgaaatactgctcatttgaagtggattctagggttaatacagattatttctttttgttcaggaaacatgatgaaagtattgagggggcatcagaattgggtgtacagctgtgcattctctcctgactcttctatgctgtgttcagtcggagccagtaaagcagtacgtgtcaaagttcttgtacattcattatgaattggattatgataatgtgtgcataatcattttaaatctaagtaacctatgaagtctgtgctcggtgtcatgaatattttaaatgttttatttcatgatgggggagaatttgcatgaaggaaattaaatatagttattgattgccaagtgagaagttggattgtttttagagataatagataataatgggcatatcagggttttttttttttgtaagtctagaaaagtttatgtgctgtagaagagatctagtctatatgttaagacattcccttgctaattattttcttctctgttgttctatttttttggtccagtttgctgtttttaaagttttgagtcccagctggtcctgtacatttaactgaaaaaaaagtaacttaaaataatataaaaatagcactcatgtatgtcctacagttataggtgaaatttgatattgtttgtcttacatagcatacctatagacagcttaagtaaagtgactgttaagagggttatgcttattgatgaactcttgtagttgtttaccagctctgttagtatagttaaattgatctcagtagcttcaagtatttataaaatggttgaagtccaaatacatgtgataattacaatacactttgaattaatggagggtgggaggctagttgaaatgcattttatttacccaaggagtatgttaaaatgatagttataaatgttggaagtttaaagcaagatactcagtttagttctttacaaatcataagaagaacaaaattagatgttgacattgctattttaggctgtgtgttttccatatgcttcttgctttccctgtcacaggtggtggcagcaatattggtgtgattgaggttatgctggcaccactcgcacacaggcgcacaatggtgttagctgggcagaaagagtggcatctctggctaccgggctgggggcgacctttaccataggatgaagtaaccttgcattcggctgcaaggtgtactgtacgtacacaggtgctggtcgatgtccactttctgcttttctttctttctttttttcttttttaaagtaatttcccccacagtaaaatacactgactcctgagtaaattgattttccagttttatggaattgggagtctgacaagtgaaaccaatttaatgtaaagtatttggctttcaaatggtttctctgtgctattttttggaattctttcagattccagagatatcttacgtctttgattcaatttaaaatttgtacttattttcttttagaaataatgtattgtgtctgtgcagaaaaaaaaaaaaccaaaaaggattgctttactccaagaggagagattgtcttaggataaacctccaagctcacatttaatataacagactgaagtaaacattagaatcctgtttagagctattctgcacagttaactactgatctttagaatctaaaattgtatatgaacttattcttaaataattgaaccgttttatattcaaatgacttatgatcgtggttagtttgggaaaaataagatggttaaattttgatttattgaaatgtaattgtattattttcataaaatagcattttcattttgtaatgtggtttaacatccttgttgtttgccaaagaaatttcatttggctgtgaatattctatttgcttgcagtatctgtttctcttcctaggctcaagttggtgacccaagcctattgtaaacaagtgattatctcaaagggagatgccaatggagtaacaatttgttaaccttacgttttctgtctgtatatttttttaaaaatctggtagtttctggaaaaaaaagagaagggggtttgtagtacttaaccctatttatttccgtatattttagttaattagtttttggaataaatggatttcagtatagctttgtggttaaattgcattgcctttattttatgtttaggcttatttttaaattaacatttaacagaaacatttgaaatagaatttgcatgtctgccttaattaacttaaagactgattttaatctgactatgacactgagcatattctttaaattactcataatttataatgcttaatataatcttaattaaatttagcagttttagtataagatgtgccattttgtcctctgtatgtctgaatgaagctataacatttgcctttttattgcaggttttcctttggaatatggataaatacaccatgatacggaaactagaaggacatcaccatgatgtggtagcttgtgacttttctcctgatggagcattactggctactgcatcttatgatactcgagtatatatctgggatccacataatggagacattctgatggaatttgggtgggtacagcatgaattattttagtctataattcatctccacctatcaagttatgtgaataattacaatcaccaatatatgcaacctaaaattacagtctattctaatttaaaatgttggtattatttaagcccttgactaatggaaagccttcgatataaattctaaaagtaaatttggctctcttgatacaagtcttgctacttaacagtacccagctctctatagaagtactaattatgtttagagtttttgttggagaaaaacagttaaaaccaaagttggacttaatcttactgtcttaaatcataaaagattttttttttttttgacagagtcttgctctgtcgccaggctggagtgcagtggcgcaatctcagctcactgcaacctccacctcctgggttcaagcagttctcctgcctcagcctcctgagtagctgggcttacaggcacctgcaaccacccctggctaatttttgtatttttagtagagatggggtttcaccatgttggtcaggctggtctcaatctcttgatctcgtgatccacctgccttaacctcccaaagtgctgggattacaggcatgagccactgcgcccgaccataaaagattagttcttttcaggtgactttaatttggatgtatcatctctactgagtcttctcagttatattaattaaggctactttaaacactattcaaagacagatgtactttgtacctgggtaattttgttttcttgaagtgactgatatccactgaaaacatatatttgacctcaggcacctgtttcccccacctactccaatatttgctggaggagcaaatgaccggtgggtacgatctgtatcttttagccatgatggactgcatgttgcaagccttgctgatgataagtaagtatgtgcattatagcttgactgacttactattaccttttacattcttaagccttaaagcctttctgcagttaagagttttaatgtctcttcctcaacacaagcccctgggagattttgttgtgtcttaaagaatatcggcctgaacaattatctgtgtaaactaaagataatgcatgcctctccctgtgttccttgtttaacttgtttaggcatagtgggttgatttttagtcagcttttagcccagcttacagagattttttaaagtaatgtcttaacaaaggttgaagcagaaggaaatttctaaagtgaaacaaatagtaaaaccaaaagaattacaaataaatagtaatttgtatccaccatgattgagattagaatatgaaatgtcacatgaatgatatgtgctgcttgttggtaagaagcagaaactagttgcaaccatctgtgttcatgcatatagcattgagtagttcggtgacgtcaattcataaggcagctcttctcttcccagaatgttagcaaacatatggagagaggttttttttgtttgtttgtctgcaaccattgtttcctgtttgctcagatagattctgcatgttagttctctgctgtatttgtagacacactcagcctgggtgaaaagctttttttcctttcctggttttttttgtttgtttattggagacagggtcttgctttgttgcccaggctatagtgcagtggtgcaatcacatctcaccacagccttgattttctgggctcaggtgatcctcccacctcagccttccgagtatctcacaccacaggggtataccaccacacctggctagtttttttaaaaaattttttgtagagacagggtctccctatgttgcccaggctggtcttaaaagtcctgggctcaagcagtccacccacctcggcctcccaaagtggtgggattatggttgtgagctaccaggcccacctagcttttaaaaatgtcttgggaaaagggtgaaacagactagaagttgattgtattgtaagtgtaggaaagtaaggagaaagtttccgggtgtgaacattctaggtttgaacactgggaaggagggaaggcagccatgcattgtagtctcttaagtgaaagtttatccaatttaccaactgatattatagaccttaaaatattttgtaattgtataaagcaagttattataattgcctgttggtgtgatgtgtgtattttgtgactcataactcaatggcatttctttctaaattttaaaaaagttgcttttaccttacattttctacaagatactaaataatttatttcattttcagaatggtgaggttctggagaattgatgaggattatccagtgcaagttgcacctttgagcaatggtctttgctgtgccttctctactgatggcagtgttttagctgctgggtaaatatatttttctcttttttttttttttttttttttttttgagatgtagtctcccaggctggagtacagtggtgcaatctctgctcactgtagcctccgtcttccagttcaaggagattctcctgcctcagcctcccgagtagctgggactacaggtgcacaccaccagtcctggctaatttatttgtttgttcgtttttccagtagggtcgggatttcaccatgttcgcctggctggtctcaaactcctgaccctgacctcaagtgatcttcccgcctcaacttcccaaagtgctgggattacaggcgtgagccaccacacctggcccatttttctcttttctttaagggccaatttaagggggcttttagcagctagtaatttattgtcagtaaaactctaataagtgttcttcatagtagtgttaccttgtcatggaatacatcattggttagttcttcctggttgggttttaatgtgaagtttgtgactccactactcacatgtattgggtgatagttgtttgagctgtagcaacactgaaatacatatacttgggtgactaagcatgtgctttgtttctgtttaggacacatgacggaagtgtgtatttttgggccactccacggcaggtccctagcctgcaacatttatgtcgcatgtcaatccgaagagtgatgcccacccaagaagttcaggagctgccgattccttccaagcttttggagtttctctcgtatcgtatttagaagattctgccttccctagtagtagggactgacagaatacacttaacacaaacctcaagctttactgacttcaattatctgtttttaaagacgtagaagatttatttaatttgatatgttcttgtactgcattttgatcagttgagcttttaaaatattatttatagacaatagaagtatttctgaacatatcaaatataaatttttttaaagatctaactgtgaaaacatacatacctgtacatatttagatataagctgctatatgttgaatggacccttttgcttttctgatttttagttctgacatgtatatattgcttcagtagagccacaatatgtatctttgctgtaaagtgcaaggaaattttaaattctgggacactgagttagatggtaaatactgacttacgaaagttgaattgggtgaggcgggcaaatcacctgaggtcagcagtttgagactagcctggcaaacatgatgaaaccctgtctctactaaaaatacaaaaaaaaaaaaaattagccaggcgtggtggtgcacacctgtagtcctagctacttgggaggctgaggcaggagaattgcttgaacccaggaggtggaggttgcagtaagccaagatcacaccactgcactccaacctggacaacagagcgagactccatctcaaaaaaaaaaaaaaattgtgttgcctcatacgaaatgtatttggttttgttggagagtgtcagactgatctggaagtgaaacacagtttatgtacagggaaaaggattttattatccttaggaatgtcatccaagacgtagagcttgaatgtgacgttatttaaaaacaacaacaaagaaggcagagccaggatataactagaaaaaggatgtctttttttttttttttactccccctctaaacactgctgctgccttaattttagaaagcagcttactagtttacccttgtggtataaagtattataaattgttgtgaatttgaagaatccgtctactgtattattgctaaatattttgtttatactaagggacaattattttaagaccatggatttaaaaaaaaaaaaaaaaactctgtttctgcaggggatgatattggtgagttgccaaagaagcaatacagcatatctgcttttgccttctgttgtttatcttacctgcagatattaagaatgtatgcattatgtaaaatgctcaattatatatttttgttgagttttttaattaaagacttgtaaaaaaaaaaaacagtatattgcaaatgtttcttaaataggttaggtggagtactttctctctgtctccattgtaaggttgatggtacaccacaggcaaattaagcaaaaaggacaatgaagaaagaatgcaggactcaggcgctgctctagaattcattcagggctccccgagtgcagcagctcttatggtggttttgtttttaggagaactgttgtaataatgcatattttaaaagcatagggaagctctagaacacaggaaggtgactactaagcaagagaaaagtatcttttagtggggaactaccagcctatagtaagtctatctggttaaagtagttattatgaaaatctagcagtctgggtcctttgagaaggcattaaaaaagcaaaactcttatgagccatgtgtgattttgaagactcatttccactgagaaattatttggaagttcctatggttagctctgttaaggaatgtaaaaatttatagggggtgtagggttatcaatttgaaagccagtagaaaatctgctcaagttacttcttgaggatcatctgtattttacaaaaagaagcacaagaagcatctaatctttatacttcttgtgactttttttcccctgcattttactttgtaatatatcggctttataattttaaaatacactggccgggcgcagtggcccacacctataatcccagcactttgggaggccaaggcaggtgggtcacttaaggccgggagttcatgacaagcctgaccaacatagtgaaacccctgtctctactaaaattacaaaaattagctgggcatggtggtgggttcctgtactcctagctacttaggaggctgaggcaagagaattgcttgaactggagaaatggaggttgcagtgagctgagatcacgcaactgcactccagcctgggtgacagagtaagactctaaataaataagataccattacttttcatatcattgcattatttttgctttccacaccaacatatccagtcaagtaaaaacagctttttttattttttattttttattttttttgagacggagtctcacactgtcacctgggctggagtgcagtggtgcgatcttggctcactgcagcctccacctcctgggttcaagcaattctcctgcctcagcctcccaagcagctgggattacaggcgctcccccaccacgcccagctaatttttgttgtatttttaggacagacggcgtttcactgttggccagactggtctcaaactcctgacctcgtgatccgcccgcctcggcctcccagagtgctgggattataggtgtgagccaccgaacctggcccaaaacagcatttttggaagctacattctgtgagatgttcacctgtttgccacctcttctcgtgaaaaccatagtgagtgccagtgtgaaaggaagattgcagcgtatatgtcaagtagaaacatgtttgaattttccatttgtctgtggggaagaaggtaataacagtaataacagactgaaggaccaaaggaaaatagggaagacgttgattatggacttggatcagattctagctacatgatttgaaaatgacactgcctctcctattttgccacaagcctgtcatttggagaactggcagatcatttatgttcagatttaattttctgttttagaatcccatggagtacatgtgaacataggaaaatcacactcagcagccaagctatccttttgcgataatgaaatcactttaaaacctataacttgatcttaggttggcaaatcttaaacttaacgatccttgaaatttcctgcctgctgtgactgtgatgcagttggattcaactggtttacactgctcttgggtcggcaagaccaaaaaaggttggactgcactgtagcatgcttatgggttgaggcagtggcagaggcagaggacttggccgtcagccagccagcacaggcgtaagaaaatagcatgagaagtttcacgagcctgaaaccattgagacagtgattacaacctccatattaatcagatgagggtttgtaggtgacatagcattttacccaagtaattctgaacagactgtggcttatgataatacattttaactagcaagtgtgtggactataaaacaaatatctagagttatatatggatgtactatcatttggtgataaaagcatagaaaaagcataagttggagtatactgggtttttttgttgttgttaaattcttttccatcagaagtaagagctgttggcagcaactaataaaatgcaacctagtgacatgctcgtcataaccttggcagatgtttatggtaagatgcttggaaggaatgaacgtaagtaggcaatctcaacctgccctttgatccataaagcattctttagccaccagcaaaaatctggtctgagccaggtataaagtgacctgttttattacaggtgggtggggtagctttgtgtggttgttttttgacattatgtatgcttttattttttactttgaggtaggatctcgctctgtcacccaagctggagtgcagtggtgcaatctcagctcactgcatactctgcctcccctggttcaagtggttctcgtgcataagccacctgagtagctgggattacaggcgtgagctgggccaatttttgtatttttagtagagatagggtttcatcatgttggccaggctcgtcttgaactcctggcctcaagtgatctgcccatcttggcctcccaaagtgctgggattacgggcatgagccacagtgcctgaccagtctaggcttatcttaacagttgaggaatcagaaaatgattgaatagggctggaattggagaaggaaaaaatgatttaattcaatttttatcaactccagcactattttctctattagagactactgtcattatccttctggtttctgttttaaagatactgattaaggaattttctttatagttccacataacagttggtcttctggtctgaaagtagtattacaggttttgttaggaaaacctataatacagtgttgcctgtcaccgtcattatagtgagtttgtgtttgtttggttttaaataaggctgaagcatcaatggctctttctgaaaaaattgttctccaaaagtaaagtgtgagctatagaaatcatctagaacaggggtgtccaatcttttggcttccttgggctacattggaagaattgtcttgggccacacataaaatacactaactgatgagcttaaaaaagaattacaaaaacaatctcataatgttattaagaaggtttacgaatttgtgttgggccacgttcaaagccatcctgggccacatgtggcccgtgggctacacgttggacaaacttgctcgagtatagatcagtaagtaagagaaatgaaatggctactccactgggtcgttttatgcttccgaattgttgaataataatgaaatgttcttataaaaaatagattaaggatgatgggcattagagagatacctgagaaagataatgattaaaatagatccaagaggccaggtgcagtggccctcgcctgtaatcccagcactttgggaggccaaggcaggcagatcacctgaggtcaggagttcgagaccagccggctaacatggtgaaaccccgtttctactaaaaatacaaaaaattaacccagcatggtggcatgcgtctgtaatcccagctactcaggaggctgaggcaggacaatcgcctgaacccgggaggcggaggttgcggtgagccaagattgcaccattgtactccagcctgggcaacaagagtgaaactccatctcaaaaaaaaaaagccaagaatgaggctgatattaaacagaaatatatatatatatgtatatatatatattttttgacacggagactcgctctgttgcccagactggaatgcagtggtgcaggctcagcgcaccacaacctccgcctcccgggttcaagagattctcctgtctcagcctcctgagtagcagggattacaggccgtgccaccacacctgggttatttatttatttattttgagacggagtctctccctgtcaccaggctggagtgcagtggcacattctcggctcactgcaacctctgcctcctgggttcaagcgattctcctgcctcagcctcccaagtagctgggactacaggtgcctgccaccatgcccagctaatttttgtatttttagcagaggtggggtttcaccatggtggccaggatggtctcgatctcttgacctcgtgatctgcctgcgtcggcctcccaaagtgctgggattacaggcgtgagccaccacgcccggctgtattttttttttttttagtagagacagggttctgccatgttggccaggctggtctggaattcctgacctcaggtgatccacccacctcagcctcccaaagtgctgggattacaggcatgagccatcacgccctgccttaaatggaaatcttaaaagacatacatttgcaccaagtgagctaaatattttggcaccaaactcacacaaaatggccgggcacaggggctcacacctgtaatcccagcactttgggagactctggtgggcagatcacttgaggtcaggagctggagaccagcctggccaacatggtgaaaccccatctctactaaaaatactccccaaaaattacctgggcgtggtggctcatgcctgtaagtcccagctactcaggaggctgaggcaggagaatagcttgaacctgggaggcaaagttggcattgatccaagatggcgccactgcactccagcctgcatgacagaaccagactctgtgtcaaaaacaaactcacacaaaatgggaaacccagtaagttgtatgattcacaatattaatctcacagtaatggctgaggaaaagcacagttaatattatggaccgaatgttgtatgcacaccccacgaccaccaccaccaccaccagtaatacgttgaaatcctaatcctcaatgtaatgatattagggagtggggcctttgggaggtgattaggtcatgagggcggagtcctcataatgggattcgtgcccgtgtgaaaggaaccctagaaagctctcattccctctccaccatgtgaagatacaatgagaagacaacagtctaaccgagaagaggacctgcaccctgatctcaaacttccaacatccagaactgtgagaagttaacttctgttgtttataacccatctagtctatggtactttcttctagcagcccaaatggactaaggcataggaacagcaggaatgcctccttgaaacttctttattttttcaagatggtctcgccctgtgacccaggttggggtgcagtggcatgatcacggctcactgcagcctccatctcctgagctcaatcgattctcctgtctcagcctcctgagtagctgggactatagttatgcaccatcacacccagctaatttttgtattttttatagagacaaggtcttgctgcctaggctggtctccatctcccagactgtagcagtcctcccgccttggcctcccaaagtgctgggattacaggtgttagccccccacacctggccaaaacttcttaattagatataaactgtgctagagcacagacagtgatttctgtgtactccccaaccatcttgccacctctaagacccctaacatgatttggcagaaattacacaggcttcaagttctcccttggatgataacagttgagctcagaagagaaacagtaaacattactgtggccttgctgtgttgcaagggtctgcaggcagcttctgggaaataggaccgggaagcccccaagtcaaaggttgtccctgccatccccctgggtgacatgagcctgtctcacttgttttacccaatttcataacaaacccaattcttgtatatttgagtttatgatgcattacctaaatggcctgtttttggtggtcagataagctggcccagccagaagtcatcttgcccatttctcaagttccatcagagtcctaatttccacatcacttccttcaaatacagcctgttgctaggtactcattcttgggtgttggttactcatttagaatgcaaattccttacacctgaggaaatccttcaaacttttcccactggactctacccctggctgatatttgggtcacagtggttgttgatgccttggcaagtgagagaccagcccccggtcagcagtcatggcagtagctctggcctggggagctgggatgggcatcctggtgcacgctcatccagcttgtgctgggtggagaaagcagctccctcagactgtgtctgggtcacgctgctcaacacctggcaaagacccagctttctaggcttggccccatctggcctcagatcaggaggctgttcatatagcagcttggcccactttctcgccacagggcctgctgcccagaggactttgcagaagtgttggctgaggctgcagtcccaagaaagacaggtgattgctggcttggctgcttaacagcttgtaactttcagagctttgatctaagaatactgtaataatacctctcctccatgaatagtgtttagcttctattttgtatctgcaacagtgtcaggtacatggcaggcacttgacagctgctactaccatctgttgagcactgaccacgtgctcgtcactatccctggtacttcttaacaaccctgtagaattatcctgtattatagctgtggaggttcagagaggccagctcctcaggtcacacagctaagagaagaccatcgagcatgtaaattcagattaatctgtctccaggctgggcccagtggctcacacctttaatcccagcacttttggaggccaaggcgtgagagtcacttgcacccaggagttcaagaccagcctgggcaacatagtgagagctcgtctctacaaataataatttttaaaaaattcgctgcacatggtggtgtgcctgtggtcccagatactcttgtagcaggaaaagctgcagacaaaacccctcagacatcgagttaaagaaggaagcagtttattcagccgggagcatcagtaagactcctgtctcaagagccgagctccctgagtgagcaattcctgtcccttttaagggctcacaactctaagggggtctgcgtgagagggtcgtgatcgattgagcaagcaaggggtacgtgactgggggctgcatgcaccagtaattggaacggaacagaacaggatggggattttcacagtgcttttctatacaatgtctgtaatctatagataacataacctattaggtcaggggtcgatctttaactaccaggcccagggtgtggcgctgggctgtctgctggtggatttcatttctgtcttttagtttttacttcttctttctttggaggcagaaattgggcataagacaatatgaggggtggtctcctccgttactctggaggctgaggtgggaggatcactcaagcctgggaggtagaggctgcagtgagctgtgattgcaccactgcactccagcctggcaactaagagagactctgtctcaaacacaaaataaatctgtctcaggagccctgtttcttttcatgatggccatagacgggcactgtcatttaggaagggcattcagtcaacatcaaataccaaaattagctctctttttttctatgaattttttatttcaatattttatttttgtgggtatatagtaggtgtatatgtttatggggtacatgggactaaattggttcttgcctgtgcctctgccaactccctagagccagccatgatgtcaggctaaacctttcccaacactccctacctttcattgaatcacagggaaaacaaacgcagaaggaatgactccaaatataattaggccattgaaacccacacaaggtgtccttcgcccaccacctgggcaaatgataccaaaggatggttagttttttcctacacaccactctccttgggaactgatctcacattttcattgcaatgtgaacaaatccaactcaaacaggctggagcaggatgctccaaagcaatcactgcaggtgaggaagtcacctgaccctgcacccctggctttatttatttgtctggtcatggtcacaggttgagcctctagctttaatgatcaacaagaggtcaggttacaagctgacgtgagccccttttttttttttaattttatttttgtgttttgagacagagacttgctctgtctcctaggctggagagcagtgacacaatcatggttcattgcagcctcaaccttctgggtttgagcaatcctcccacctcagcctcctgagtagctgagacttcaggtgcgcggcatcacacctgactagtttttgtattttttgtagagttgggttttcaccatgttgcccagactggtctcaaactcctggactcaagcaatctgcccccatcggccttccaaagtgctgggattacaggcatgagccagcacacctggcctgacatgagccccttctaccagctgtatcagacaagggtagtcccacttgcctggagctgacctgccagtaataccagccattggggctggccctgggttaagagtccaggggccagactgcattgggtggaactgttatctagatcaactaatacagatgccatctagggagcagggagaattcatacccaggaaggacccaactcagtaataaagggtcagaccattcttaccatatttcactgataagaaagttatacttttatctctgcactctgaaattaggacatattttataatcaaagatgtcttaaaaattgttttaagtggtacacactgtaatggtatattatagataatggtacagattataagtgtcattgaggatttgataaaacacaaagtcaggagaatgtacatataaaagtcaaaggtcagtggaatgctatatataatgtcagcagtaaaagacaccagaaacaggtagtaagtgaagtgttaatttctatttgtattaaataaagtgttaatttccatttgtattgaaatatagctaacatttatgaactttcaccatgattcaggcactgttctaagtgcttaatgtgtataattgaatgctcacaacaaccctatgaaacagacagttatcttcattttataaatgaggaaactgaggcacagaggggttaactaactcgccagaagtcacgtgatagtaaatagcagagtcaggattcaagcccaggctatctgactccagagtcaagaaatacttggggctgggtgcagtggcttacgtctgtaatttcagcactttgggaggcagagtggggaggattgcttgagtccaggagttacaggccagcctgggcaacaaagtgagaccccattcctacaaaaaaatcaaaaaattagctgggcatggtggcctgtgcctgtggtcccagctacatgggaaggtaaggtgggaagatcacttgagcccgggaggtccaggttgcagtgagccatgtttgcatcactgcactcaagcctgggcaacagagtaagaccctgtcacaaaagaagaaaaaaaaagaaaaaaaatacatggcttaagatctttgctctaaccactttgcagctgtgtgcccttgggtaagccccttaacctctctgaaactcctcctcataatcacagtatggcccagggatgtatggattaaataagatcaagccccagaagcacttaacatagggcctagtcttggtgagggaggcagttgttattaatatgcccaaaagatcacatctccacaccaccaccagcctggctatttatgaaaaccccatcccctatacaaatttgaaacaaatcagagaattgttttagtgttttgagcagttgtttgtttagcttttttttttttttcctttcctgaaacaatgccaaagtccttaaaaacagccacaccccaccatggacttcctgtgaatggtcagatgatctgggagcgatgggagggaggcagagaagtgggtgaaaatccagcttgacttcctttccccaagatacaagccctggagcccaggggaggagcctccttccactggagagtctgcctgggcggggaaggctgcagcccgggctgggcggaggttttgctacaaccagtagttgggccaactccacaaggtggactgtgtacaaagagacagacgatattgtttaggggccccttgggtatggacagatcatggcacaaaccaccctctggggcctgattctgagcctctgccctgacagaggctgccctggattcctcagcatcccgtgcctctctctgtcccagcactggtcatccatgcactcacttattcattcattaattcatgcatgcatttatgtattcactcagcagcaattgaacacttgccatatgccagactactggacgctggagctatcaagacagtttctgccttctaggaactccagtctagggcacagatgataacagacctgcaaacccctaaacagctgaggaaaagacaacctcataattgccataatgggccacatgcaggatcactaatcagccttccttgcttgcacaggaggcaacagagagagatgattgacaatacactactagggtaggcatcccagctctctactcactagcaagtagctgaacctctctgcgtctccttccttcactgtaaaatggggataatagaagttacatcctcgtggggttgttatgaggattagagacttaatagttctgaatctggaatagggctggcctggacaatgtaagtggtatctttctttagtatgctgcaagttcttggtacaatgctggggttctatacccacaccaccccccaagtgggagaatgtgcccaatggacctcaccagaaaatgaggggtgacaaggacctcagagatgaactaaggctggtgttgaccttcacagttactggtggaatttctgaaaacatttctaccaggcccattgcctggatattctaagtccaaaccacaacccaggccacacagaggtatatcccctgctgaaaaccaccaatgtgattcaaaccccttcatgttcctaaagtcaatcaacttgaccaagacaaggtgagcattagtagcagagcccagactgataaactaaggtgctgctttctttcaatcctattactggaaccaatgccccagcagcccctatagccaacgagacaatggcagaaagcaccagaaaccaaggaggaagctgggaaactccacgtggggcagtgcctgctgccctgcccatctgcctccctacttgattgccccttcccagttcaaggcatactttagggcccacttcttcaattcctgccactgaaggctaattccgtagatagttgtggacctgctcttgggcagaacaaggcctgaagagaagaggcagctgcagagcctggcagtctctcaggggctcggccatcaggactgcatctgagcacacagggccagccaggtggggaaggtcatggcgggagcccacaccctacactggggaactggctgccagagagttggccctgtctgcctccaggcagcttgaacatcagctcctggttgggagaaaccttattcttaactctcagagttaagagcccatggataccctcactcccagagaacaatgtatgcactccacatttggaatttattttcctagtgttggatataaactcctggcatccactcttgctgaggttgtcttcacagacctttgtccagcctgcccctggtagccacaggggatcttcctaaaatgcagatctgacccaggctgggcctttaaactcttgactgccctgggccctcccctgtctggaccctgtccaatccctccaggctttcccaagcccagacctcctgctctggttcttctccccactcttccatgatccagctggccctccagcctcctcctaggcctgctaaaagaaatatatttatgtttttaaagagagagtcggggccaggtgcggtggctcacacctgtaatcccagcactttgggagactgaggtgggtagatcacctgaggtcaggagttcgaaatcagcctgaccaacatggtgaaatcccatctctactaaaaatacaaaaattagctgggcatggtggcacatgcctgtagtcctatgtacttgggaggctgaggcaggagaatcgcttgaacctgggaggtggaggttgcagtgagccaagatcgtgccactggactccagcctgggcagagcaagactccatctaaaaaaaatcaaaaaaatacaaagagagagagactcgatttttgaaaatattaagtagtgaatagcacagatgattggcagttgtggcacaaattgtgagagtggtttgcaaagactaagttggaaaagcaatgcagaaagatggaagggacagagggaagagatcaaggggccagaaaggggtcttgatcagctctttggcattgacagtgttcgtgtgcatgactctctagctccagacctggagggcaggcggggccagtcacatgtttgtctcttaatcaattgttatgattcagaaacaatgagtggcaatgctcaggtgtgtcaaggaagaaaggctctaggtgtgatgtaagtctggacagatgactatgagtttgccaagttgggtgaggggggcagtaagggtatcagagtatgaagcagtttccagtattttagggaaactgacacaatcaaagcatagcagtgcagggacaaggttagttttgcttgtcagctataggacagctgggaaataatgtaccagagagtgcaaggcaagaggcaggaggagcagggtggaggctatgacattattaatattcattctactttgcccatggtattaattattatcatttataattgccacatcatgtctcagaacattttattcaatgaaaataatcatagttaatattcacagtcatgtatacctcacctattctaccttctttaattcttataatcctgtaagtttggttctactctaatcatcatccttattttacagaagaggaaactgaggcacagagaggtatataactttccctaggttgcacagcaagttagtgcagagctgggatttgaacccagcaggctggctctaggaactgtgtttctaaccactgcactgccttttccctcgcctcacaggttctcaaacatctactgaggacctactatggcccactgcctgtcctatgctttatgcatagggataagtctgtgtattgaaggagctttcagtctaattaactatttccctgtgggtggacacttaaagtcttttctccttttaaagatagctcctcgaggaatgaagcttttgtaatctcaaagctggacaaaaactgtgcatctagtgggtcagaagttctgcttcataggctgggcgtggtggctcatgcctgtaatcccagcactttgggaggccaaggtgggcagatcacttgaggtcaggagttcgagatcaggctggccaacatggagaaaccctgcgtctactaaaaatataaaaattagctgggcgtggtggcgcacgcctgtaatcccagctacccaggaagctgacgtgggaggatcacttgagcctgggagatgaaggttgcaggtgagccgtgatcacaccattgtaccccagcctgggtgacgagtgagactctgtctaaaaaaaaaaaaaaaaaaaaaaaaaaggagttatgcttcatagctcttgttcatgctttcagattgctttccaacagtgcagagtccatttaaaccacaagcacccgtgtgtatctgcgagtggcaatctcgccagaacctcaccagcactgggcattatcttgccaaaaaagttttggtaccccgtgagttccacaggcagcttcttcctctgtagtgttcacatccccagtctagtcacaaatgaagggaaaagcttgttaaaggtggatggaatattaagttacagagaggatggaggatacacgtacaactgtgaagtgggccagattcacggggcttttgcacttagactgggaaaagtactgtctttcttgggtctaatctgaaaatgttcccttgaggcagctagatttcaagagcaagaggctcagacagagaacatgtaactttgaggtgagatgtgtaagtaaacaaggaaagaagacagattgggaacatttctccccaaacattccacagataataaatattccacattatcatttaatgtcaccaacctctcttgttcccatcacattgtattataattgtgtatacatctgtcttgtgagcagaccaggagtctagacatttttccatctagtttcctgacgtagatagtgacgtactttgtgtggcatgatgtgccagacacatggaagattctctgagaacactcgttgaactggtctgaacatcccacactattgtattatgctggttcctaacactcatactgcaatataattctgtgaagaagaatcacatgcactcttttcttagcggggcagcagggcagggggcaggtgggaaaaggtgagcaagagggaggcaaatcttgaaagctgtgcaggggccaggtgcggtggcttatgccttacgcctgtaaacccagcacttttgaagattgaggcaggtggatcccttgagctcagaagtttgagaccagcctgagcaacatggtgaaaacccgtctctaccaaaaaaataaagcaatcagctggggtggtggtgcacccctgcagtctcagatacttgggaggctcagctgggaggatcacttgagcccaggaggtggaggctgaagtgagctgagattgcaccactgcactccaggctgggtgacagagggagaccgagtctcaaaaaaacaaaacaaaacaagttatgggcacgatggctcatgcctgtaatcccagcactttgggaggctgaggcgggtggatcatgaggtcaggagtgtgagactagcctggccaagatggtgaagccccatttctactaaaaatacaaaagttagccaggcgcggtggcgggtgcctgtaattccagctacttgggaggctgaggcagtagaatcgcttgaatccgggaggcggaagttgcagtgagctgagattgcaccactgcactccagcctggcgatagagcaagactccgtcccaaaaaacaaacaaaacaaaacaaaaaactgtgcgggttatggcagaagtccactgtaagagatattcagaagccctcagtactagggagaacatggaacagagtttctgttctttatttctcttatctcaccccccagggcctggatcaaagcccagtgcacagaggggctccacaaaaccacaccagtcacctggcaccaccagggtggacccccagaccagggtaggccccagcctgtattgagacaataagcagacacagtcctgcaaagctaggcccagcaacccagcctgcagcagtggagatgcattgatttgcatctgaaaataagctgcatctgtatctgccactgcttcaaaaggagagaaaaaaggggttgttagcaaagctggtgggcagggttgcaaaaggaggctgagtctgtggctaactgggttgtgcgccgcatcagacatttgttcatctgtcctaagagcctgagggtggtggagatgtttgatgacaaataaggtggttgagggggtcaggggtgccagaaggaccacagaggccacacgggaagacagaagctttggatggggctgcttcctgccctggggatgaggaacaggtgagggggcgggtgagcaggtgtcgagggaggggtgacttgaggctgacagtgcactcctcagagtggcaattccatgcagcctgctgtgcacctgtcagcctcttgtcatcacaaacttttaaaaagcccagaagatgcatgcatgtctctgcgctcacagatccacatgtaaagttattctccatggaggttcccacagcacgcacccagacatgtaccataaagcaaatctccctaactgtccagccgtagggagggacaggttcaccatgtggcaggatgttaggagcctttacaaagaaagacacgaagctgtaggaagagaacacagaagttccagaatggtagttcagtgattataattgtatatatgtatatatacatatatacaaatgtgtatctatatacacatatatctatatttacatatatataaaatgtgttgcaaagcttagaaggatggatttataccaaactcttttttttttttttttgaggcagagttttgctcttgttgcccaggctggagtgcaatggcgtgatcttggctcactgcaacctctgcctcccgggttcaagcaattctgctgtctctgcctcccaagtacctgggattacaggcatgcaccaccacgccccactaattttgtatttttagtagagacagggtttctctatgttggtcagactggtctcgaactcccgacctcaggtgatcggcccgcctcagcctctcaaagtgctgggattacaggtgtgagcaactgagcccagccgtataccaaactcttaatagtgtgaacccaaaatatatgaaacaggtctcagttagtttagaaagcttattttgccaaggttaaggacatgcccataacacagcctcaggaggtcctgatgacatgtgcccaatgtggtcggggtacagcttgctttcctttttattttttttcttttctttccttttttttttttttttttgagacagagtttcgctcttgtcatccaggctggagtgcaatgatgtgatctcagctcaccaaaacctccgcctcctgggttcaagctattctcctgcctcagcctcccaagtagctgggactacaggcatgcgccaccacgcccgggttaattttgtatttttagtagagacgaggcttctccatgttggtcaggctgttctcaaacttctgacctcaggtgatccacctgcctcggcctcccaaagtgttgggattacaggcgtgagccactgcacttggccgctttcatacattttaggaagacaatacatcaatcaatacaggcaaggtttacattggtttgatctggaagggcaggacaattcaaagtagggtgcagcttccagaggtcagattttaaaactttctgattggcaattgattgaaagagttattatcggtagaaaggaatgtctgggttatgataagaggttgtgaagacctaggttttgtcacacagacgaagcctccaagtagcaggatttagggagaatagactgtattgtttcttatcagacctaaggtccccgttggtgtgaatgctggagggtataatgaggcatctcccaccccctcttccatcgtggcctgactagattttcaggtaaccctggaatgcctttggccaagaggaggggtccattatttttggtttacaacagtgagaagtgagttgggggagaattggacttttgtttgggttctattttatacacatctctattgtttggatattctgcagcaaacattacaaatttttttaaatgctgaagtcaaattgatgccttcaagtctatgaacgctgtcatcccagcaaagcacagtgcacctgctttcccatgtgttctgggcatgtcctcacaagttggggtgagacagagttgatccctctgccactctgcccactcctgccaatggctgtgcttcctggcaagtcattggctcttctgagcctcagtgtgcccacccataatgcaggcagaggcatctcagaagctccagagtcactgggaaatggcacatggggtggcaggaaggtgggagggggagagaacaagaaggcactatgttagcaaaactcagcatgagggagggccagctgcagcccagctccttggctgcaaccacaagggagggcagggaaagaagaggaaggaaagaaaaaaggagaggagccaggcctggtggttcactttgggaggctaaagagggcagatcacttgaggctgggagttcgagaccagcctggtcaacatggtgaaaccccatctctactaaaaatacaaaaattagcaaggcttggtggtgtgcatctgtagttccacctacttaggaggctgaggcaggaggatcgcttgaacctgggaggtggaggctgcagtgagccaagattgtgccactgcactccagcctaagctacagagtgagactccatctgaaaaaaaaaaaagagagaaaagaaaagaaagaagaggaagggctactgcactctggactcagtgccctccttggtctcacacccttgctgacctccctcctggcacatgaggtcttcatgctgctcaggcccatggctgacctcctctcctctggagtggtccatccctaccagatctcctcctgtccagctgagcagaccaggcctatacaggctgcttctggctccactgaggcccaggagcttacacctttggaccgggtgtcaaaagtgtccttcttattagcaaaaagaattttggagggaaaaacaaatgacatcctcagacatcctagggcagagtcagaagcagagaggagactgaatgggctcgggtgggtgtggaaggtcactgcaggccgccataggacaggcctgggctcacaggagcaggatgtggggagggggattgccaggcaggggtggggaccaaagtgaaggccacctggtgggagccagtcagaggggtggggcagggttagatcacaagggaatccaatgccagggggccaggggatgttttgcaatgtgggcaactgaacctgagatgtgacaagaccagtgatttggcgacctgcccaggcaggcccagcccccagggtattgagatgacacattctaaactcaggtgacccgggccttgggagtgcactagcaactggctgtcagtcacggggctcttcagatatttgtcacgtgaatgagccagacagtaagtggagatgcccttcctagtcacctactgccggcgttcacgctgtgaaccagcgaactaggccaccggcctgacccagttttccctgtggcctgccaagccaaggagaagcagacgcggccggcgcaggcgtccagggtgactcggaggcgtggctctgcagtcgcggctctgcagtcgccttggagcggctgcccttccgaccccgcctgggctatgactcatcttcggtggaggagaaaggggcctttgtgagcgcccagctccggcgtctcctggacagcaccgccctccggtggccgcgagtcaggagggctggggaagccgcccgagaggcagcgcccgagctccccacgagctgctgtgccattggaagcgccagcgccctcccctcggagtccagccaagtcggggggaagactgggagagaaatcgtcaccccctagagggcaagtgggctcagccctaggaaatgcttgtttctccagcccctcccagacgccccggggaaacggcatcccagagctccgctccctggaggcccctccagagagggacccggggccccgccccgcagctggagaaggggtgaatgcctttcctacctaacgcctggtccgcggccctgcttgttgcgtctccaagaccacgtgtctgctgcattttaaaaatagttgtgaacatctgactttctccttttgtgagttgcctattcatatccttggtctgcttttctattttctattttttctcttgttgacgtacagaagcactttaaaaatgtcagttctgtcgaatgtgttgcaaatatttttctaagcttagaattttaccttctgattttgtttttggtgatatttgatacaccacacgacattttgatgtgggatgaccttttgatgtttttctttttctttctttagttttttatttttgagtcagcgcctcactctgtcacccaggctggagtacagtggcgtgatcttggctccctgcagtctccgcctcccggctcaagccatcctcccaccttagcctccctagtagctggaaccacaggtgcacaccactacgcccggctaatttttgtatcttttgtagagaggaggtctcgctatgttgcccaggctggtcttgaactcctgggctcaagcaacctgcctgccttgggcctcccaaagtgctgggattacaggcttgagccactactcccggccttgatgttttcctttattctttctcccttttgtttttttttaattgtaaaactgctcccatctgagtatcacacagacatttcagatctatattttttcttttctgctcctcttccccccttcccttcctccatttcctcttactccttcatttggcttttaaacccacctgggactaattttgatataaactggaagataaagatctaaacttatttttttctgaatagtcaacttttcatatgtcattattcaggctttctctcttgtttgtttgtttgtttgttttgagacagtcttgcttttgtctcccaggctggagtgcagtggcacaatctctgctcactgcaacctcggcttctcaggttcaagcgagtctcctggctcagccttcccagtagctgggattacaggcgcgtgccaccatgcccgggtaagttttgcatttttagtagagatgggttttcgccatgttgaccaggttggtcttgaattcctgacatcaaatgatccacccgcctcgccctcccaaagtgctgggattacagacgtgggtcaccatgcccagcccagcctttctcttttagtagaatatttcctcactggtttgaaatatcactttgattataaactaaatgctcgggcctatttctggccaggaccctgaccttatacattaagccaaaggatatggacttcttaaaaaaatcatattaggccgctaattatggatttaggacatttattcacattgttttaggctccaactaaaagcaggcttgaatgaagcagctgcacaggaaaactggataggaaagatttcatttaaaaggacataaacattttaaattctttttaaaaatttattattatttatttttaatagagacagggtctggctttgttgcccaggctggctttgaactcctgggctcaagcagtcgtcttgcctcagcttcctaaagtgctgggattacaggcatgagccaccacacctggccaacattttcttttcttttcttttttttaattttcttttttttattttattattattatactttaagttttagggtacatgtgcacaatgtgcaggttagttacatatgtatacatgtctggccaacattttcaattcttattatacaaaatgtcaaaccttcctccagaatggacataaatagactaatgcatatcctcccagaagcatatgagaatgcccttttcactacaccgttctgaggttgagtattatttgtaaaactatgtcctagtttgaaaggaaaaataggatctcattgttctctcataatttgcatttctttaatgcttgagagtgaattttttcatggtcatttataaaatacctagatataagcttgacacaaaatgtgcatgtcctataaacaacaaaaacttaactaagaggttttaaataaagtttacatacatggaaaggcatgtgatactcgtgaatggaaagatgccagttctggccaaattaatatataagttttgtgtgattcttttttttaacacattttttcttatttttaaaaaaattagagacagcctcttgctgtgttgcccaggctgaagtgcagtggtgtgctcatggctcactgtaacctcaaactcctgagctcctgtgatcctcccacctcagcctcccaagtagctaggactacaggtgcatgccaccacgcccagctaatttttgtatttttaattttttttgtagagatggtgtcttgctgtgttgcccaggttagtctcaaattcttttttttttttttttttggaaagagtctcactctgtcccccaggctggagtgcagtggtgcgatcttggctcattgcaacctccacatccctagttcaagcaattctcacgcctcagcctcctgagtagctgggattacagatgtgcaccaccatgcccaacaaattttttgttttttagtagagacgggattttcccatgttgtccaggctggtctcaaactcctgagctcaggcaatctgcccacctcagcctcccaaagtgctaggattacaggcatgagctattgtgcccggcctggtctcaaactcttgtgctcaagcgatcctcccacctcagtctcccaaaatgctgggattataggtgtgagcaactgcccatggccagttttgtgcaattgtattaataataaaaattccaatatatttttggggaattttgcatagtgaatctaaaggtcatagacaagtggggacaaccaagaacactttgaaaaaaatggccagcgaaggagaacttgttcatattagcaggtgttctagaaagaccctctaatctccctacccagctgggattttgaagagatgttgtagtgaagttattattttcagagacatgggccaggttaagggaaccaagaggggaagttgaagcttgtgcaacagcaggactccattagcaccccagacagttcggagggtcggccacacccaagttacagccctagggctgcagtcactgccagaaccacagcaaagcagggagggagcaggacaaatacataccccctcccctcctgtcacctgtcccccttgctgttgcctcctgatggctgaaccttattcaaagtaccaggggaagttaagtgattcaatgcttagggctggctcagtctccgggggcacagagaaaggtaggggaggctgcaaagagtatctggggacacagagattaatcaggacatgcggtaagtccaccttgggacacttttctaagaaaatcatctgccatatgctgaaatactttttacaagtatatggactgcaatattacgttctgtttcaaacaagccaacttaaatgttcaacagcagaagattcattaaataaaaaatgttatgtcggctgggcacggtggctcacgagtcatcccagcactttgggaggctgaggcaggaggatcacttgaggtcaggagttcaagaccagccagtccaacatcgcaaaaccccgtctctactaaaaatacaaaaaatagctgggcatagtggtgcatgcctgtagtaccagctactggggacgctgaggcaggaggatcacttgagcccaggaggttgacgctcagtgaactatgattatgccactgtgctctagactgggtgacagaacgagaccctgcctaaaaaaaagaaagaaagaaagaaagaagacctgaaaggagagtcaccaaaaggtaaaatatacttattttggagtgtgggactgtgagcaatatcaatttcttctttaaactttttttgggtatttttcaattttccttttatagtcagaaataaatccaagaaataggtgcaacctcgagataaacaggactcaggatgctgagaatgtttccacagctcaccttcaggattgtccatgttccactttactgttgaacgtgaacttcatgtgtcagttctctgtggctgtgcagcagatagtcccataatttaggggctttaaacagacaatgattttttttttttttttttttggcagtgtctggttgattgggcggtctttgcctaggggtggctcatgtggctgtgttcactggcaacaggctggtgggaatgtccaagaaggcctcttgtatttgcctggggccttggggccaggcacctctgttctcctccaggaatctcctggttcctctcacagggggatggcctggacttcttgagagcatggtggcctgcttacaagagcaggagcccccctgtgcaaatgtctatcaagcccctgcttacatagctcttgctaatatccagttggcaaagcaaatcacccggccaagtccagagtctgcatgagaaggggctacaccagggtgcaagtagtaggaggtggagttgggtggggcactggttagcagtccaccacatttcttcataaggcaaaagctgatttcatctgcttatgtaaacttcatcaaatatatcgctaatgctgtgttaatcttttagaagaaaaacaatgtccccaagagtccacctccaagagaacaagcaacttcctagcagatgctgaggcttgcaagactaatctgggcttggaagtgttaaaagaaaagattttaatttaaaaagcaaagaaagggccgggctcagtggctcatgcctgtaatcccaccacattggaagccaaggcaggcagactgcttaaagccaggagtttgagaccagcttgaccaacatggcgaaaccccgtctctactaaaaattggctgggcatggtggcctgtccatgtggtcccagctacttgggaggctgagatgggagaatcacttgaactggggacccagaggttgcagtgacttgagatcgcaccactgcacttcagcctaggcaacagagcaagactgtctcaaaataaaataaaataaaaagcaaagaaagtccttgaacccattggaaacatctttcaaggagcatgaaaccaacccttttatcacgtaacaagtattaatggaaagacatgagacgttgcaaagtattactagatgctggagtctagagattatctatttgacatttaggcagagagcaaggaaaaaacacaaagtactaaggaagcagggagcctctctaaatgctgataagacgatgaactgcgttagtcggggaacactttgggagactgaggtgggtggatcatttgaggccaggagttcaagaccagcctggttaacatggggaaacccatctctactaaaaatatctctcaaggcagcctcttggtgagcgaaagttctgaggcaacccggtggagggttagagttccccgatgggcaggctttggtttgcaaatcaactggtaaccctcaagaagagatccgtctaggagaacatataattagatgaacttgccttgtaggcatctgctgaactgcgaggtaaaaggttatatttgcatgtctaaaggaatgagtaggaagtgggaaactggggaaccggggagtgagaaaagaagagagaaaaaaataattaaaccatctcttagaaaaacggggctactcagttacaatccctcagctaaatacccccggagtgtgtttgacccaggctcacagccgtccctggtggggttgagccccagttgcccactgcggttaactcagacttgtagggctttcctctcttccggcctcactgctccccttcctcactgcctttagatttctgacctctacttgctgatttaccttgagcaattacttcaactctgtgcttagggacctcgtttgtaacatagggtggttacatagtggtaacataggtacctgctatgatgaggaaaaaagaaggtaacatgcacaaagtgtttagaacagtacccggcatatagtatgtcctcaaaaatgtcaatcatgactacataaatagaacaagtacgcaggccacaggaaataaaactcacccagccagcttcggtttccacctctatgaaatgtacatcaaaatgcctattttgagagatcactgtgaggggtacgttgaatgacataacctatgtcaggtacaaagcacagggcttggcccagatggggccactgctggacaagctaactgctctattttcatcaagcggctgtgctatcaagagagaatgacctctaccaagcaagaagggccaagagttggggtgcagatgagaccacttctgactcccaggccacttcctcctttgtcactggagaaaggtgcgatttcaggcaggtcatgtcccttgggccttggttttaacatccctaaaaaggagtgattggatttgggggattgctaaatgacgtcctaccggctctaaagatctagggagagcccctgtcctgaaatggacacacacacacacacacacacacacattcctatacacacatagacacacacatacacactatatacacacatacattcacacatacacaatacatacatatactcacacatatacacacatgctcatgtaactgatgggtttttccttcctgctgcacaaataaagaacacaccatagcagtagggaaagaatttaattgacttgtagccagccacaccacacaggagatggagttatcactcatatcaatctccaaggctcaaaggcagtttgggtaaggggtgggggtggccagccaatgggtgcttgctgctgattggttggagtggagatgaactcagagggggtcaaagctgttgtgttgagctgagtcactcctgggtggggccacaggagtcatcaggtccaggtggagtcatgggtgtcagacatgcaaaaaatatctgaaaagatatctcaaaaggtcagtctacaatagtgatgttatctgcaggatccccctggaataatggctacaccttatcagaaatcagattcctcttctctccctagtctaatggcctttcatcagctttaaaaggcagttgacttttggggaaggcctagtataatttaaactgtaactttggcagggtgctgtagttcatgcctgtaatcccagcacactcggaggccaaggtgggtggatcacttgagaccaggaattcgagaccagcctgggcaacatggcaaaccccatctctagtaaaaatacaataaaagtagctgagtgtagtggcacggacctgtctcagctactcaggaggctgaggcatgagaatcacttgaacttgggaggcggaggttgcagtgagctgagatcgcacgactggaccccagcctgggcaacagagagagaccctgcctctaaataaataaataaataaataaataaataaataaacgataacctaaatgtctcccaaagttagcttagcttaagcccaggaatgattaaggcaaatgcgagatgggggtgggttagattagatctctttcactgccgtaattttctcaatgttacaatctttgcaaaggcagtttcactcacacacacactgcagagaggaagcctctgtggccacactgggccagtcagtcacctctggaagccttagtctccaggctcagttggccttgaaaatcaccctagagaagaataacgtgtctagaaaacatttccaggcacttccatgtgctgtgcaaatgctgttttcttcttaggtccctcctctccttttgtcactttgcaaatgtctgcagctgccttgccaagtatgggatcaggtcacattgctctgccgagggctgggctggggcccaggaagccagactctccagatctacctgccctgtcctcccacccacctcttcccagcccctgcaagaattcattagcccggaggaagaaggcaacagcccttgagggtgttttactgggctcctcaaacatgtctgcagcccttcccaggaagctaggttgagagaaaactgcagaacagatggggcccgggaaggaggaagcattggactgaagaggcacagagacgagccaggagagggctgagtgatgcagatgcagcccctgggctggctctaggccttagacacacacatggcaggcctttgctcagtgcccggacagctccagtgggcaggcagaaaactttcttgtttttctgtacctgtgccccatttctgattcggagttcctttgccatcaggctggtggggaaaaatatgtaatttctttctttattttttggagacagggtctcactccgtcgcccaggctggagtgcagtggttccatctcggctcactgcaacctccacctcaagggttcaagcaattctccagcctcagcctctcgagtagctgggatgacaggttcatgcccctgtacccagctaattgttgtatttttagtagagatggggtttcaccatcttgcccaggctggtctcaaactcctgggcccaagcaatccacccgcctcagactccgctgggattaccaccccacccggcctaaatatgtaacttcttccaggatttatgtcctagttctgaggtctttgtgcaacatcacgtggtaggaggatgggattttggtcttcagaacaccatccatggcttctgatgctgtccttgccccacccccagggccccttcagggccaatgttttcttgttacttcaacgtggtcagcctaaaggatctcactgcctccctgagaactgctccggggccacagatctcttgctctctgtcattcctttctgggacaggagaccctgctggttctggaggagtgtggggtctggtctcccctctgcttctggccaaggtgccttgagcatttgcatgaatcttctcttccccttttctcgcttctagacaccagcttagttccctaagggttcaggcctttaagaaagagttttagggtactcctcaatctgcccccgccctcaaagctacttgaatgtggaaaagcaaatgggaaaatacagggagaaaaatgaacatcaatgagtgtctcaaaataatatcctgccacatacattatcccatttaatctcaccacaatcctctgggttgttttattttaatttaattttattttttttgagatggagtttcgctcttgttgcccaggctggagtgcagtggggcgatcttggctcaccgcaacctctgcctcctgggttcaagcgattctcctgcctcagcctcccaagtagctgggattacaggcacatgccaccacacccggctaattttgtatttttagtagagatggggtttctccatgttggtcaggctggtctcgaactcctgacctcaggtgatccgcctgcctcagccttccaaagtgctgggattacaggcatgagccaccgcaccagcctacaatcctctgatgttatccacattttatagatggggaaaccaaggcttaataaggtcacgtaactagcaattctgtgtccttcccatctatactcctgaaaacactgaagtagatcccaaacttttttttttgtacacagaactcttttctttttttccttccttcctcccttcctccctccctccctctctctctctctctttctttcgagaggaggtcttgctgtgttgcccaggctggtctcaagtgatcctcccaccttggcctccccagcgtactgggattacaggtgcacccggcccacagaactctttattcaaatgaatctcccttgaaaaacctgaaagtgtgtgttgctgctctggtcaaaggcaactgggacgaggagctcagggtttgcctccttatcttcacctctggatgcacctgtgacacttctgtgacttcacaggccccaagagcacatttggaaacctctgggctgtatgacctccaggcaggttctgaggccaacccctcaactcgctatgcatggattgtgatactccttggtgcccagcccagcagatttccttgaaagatgctggcttcttggcacgtgtagtcaaaacgtcccacttggttcttccccagactgctgggccccactcctggatgggatgtcagggccagatccatggcttcctgagagaatctggaggctagcccacctcctgctgcccaatccctccagtgtgtccaacataatcagcccaaactgcatggggccaatttatttaaataaatgttaatcctgctcagagctagatgaatggggcctttggaaacagtgctacaatttgttccctgaggtaagtctttttttcttttttgcattcatctcttcattgaggctgctgccatctcatccccttctgattcataaaatcaatatgcctagaaatgttcagcctggacaatacagtgagaccctgtctgtacaaaaaattaaaaaaaaaaattagctgagcatggtggtatgtgcctgtagtcccagctactcaggaggctgaagtgggaggattgtttgagcccaggaggcagagattgcagtaagccaggatcatgctactgcactccagcctgggtgacatagaaagactctggctcggaaggaaggaaggaaggagtaatgctcacagcccttgggttttcgtagctcatccctccatccatccactcatgggataaacatcagatgaacatctgagtactaggtgctgtgctgagcccttgtcttccacagacaaggaagactcatctcttgtacagtgcccaattcccagttcccagctcgtgcctctgtgcttttccagccctgggaaattgttgtggacatttgctggcactgggccactcagcattggtttcccctcacagctctctgctctcccttcccattgcctgcctcctgccagcacagtcttggtgagacactaaatcggggagccttgccctcccatcctggaagccaaaggggtctctgaaggttttccctgccccagttcttcctctccctgccccagtgagaccaaagcattgacacctgacctcaatccttccagtcagagcccttcccaggactttgaaacaaggtgggagaggcagttgacttcttcaccacagccacacagcctgactgccaagaacctctctgctgcttcctgttctttgtccagacctagttctccagccttcctgtgggttctgggcatctccaaaattttctttttaatttaaagacaaccagagttggtttctgtttcctgcagttaaggatccctggccaggcacggtggcacatgcctataatcccagcactttgggaagccaaggcgggaggattgcttgatgccagggggtctagaccagcttgggaaacagcgaaaccctgtctctacaaaatattttaaaattaaatctttttaattttaaaaagcttagtggcatggcctgtagtcctagctactcgggaggctgaggcaggaggatctcttgagcctcaagagggttcaaggttacaatgagctatgatggaaccactgtactccagcctggtaacaaaacaagaccctgtctgtgaaaaataaatacatttttaaaaaagatccttgaccaacatactgggttctagctgttatttcaattgtatctaacatgctggaaacatactttgccaagcacctgttctgggccaggtgctgtggatatattgacctggaggaagacagacaagtaaacagtcagtgtttaaattaggggaaatgttgtggaagcctagagaacaacagaggaagaggtcggctccacctgaagggaggaggggtcaggaaagcttcagagagcaggtcatcccaacgggggtccctgtttttgcccctgcccccacctgcaccccctcagccttctcaacacagcaacctgagggatcatttacaaatcagatcaggtcacggctgggctcagagctctccaatggctctcatctcactcagagtcagagctggggtcctgctgaagcggtgtcattatctggggtaaatacccgaggttccttgactcacgccagggaaattgaagacacagacacacaagaagtgagtttaagagtggaggtttaacaggcgaaagaaagagaaaagagaataggtttctttcctgcagagagagagagaggctcccgagcggatcttctggttttgtagttaaaagcacggggttttacagacgaacttgagaaggtggtgtctgatttacatagggcctgagcgattggttaagccaggtgtgacgtttgcatagtgcgtgaaaaagctggccatcccaccctgatcttttattatgtagatggcgtctctatctggccagcgccatgttgtctgttccttactgtacatgtggttggcaaagaaaagggaagatggagcctccatattgaacatgacattttggcccccaggtagcattttcctattggcacagctgccagcattcacccgtgcaagtttccagcttgcttatctatgtctgcagctcgattttacaggctctttcttagaaaaagaaatgatttgggggctgcttttgattaaaaggaaaaccttactgaggacttccttaccctcattatctgcctgagaaatttcttttatttttattttattttattttgagacagagtctctctctgttgccaggctggagtgcagtgatgcgatcttggctcactgcaacctctgcctcccgggttcaagcgattctcttgcctcagcctcaggcacgtgccaccatgcccagctatttttgtagttttagtagagacagggtttcaccatgttggccaggatggtcttgatctcttgaccttgagatccaccctcctcggcctcccaaagtgttgggattacaggcgtgagccaccatgcccggccagaaatttctttttaactcctatatcactacgatgctctagaaggccttatatgaccagcaaagactacatctcctggtccctgtgcagctgggtagggcctagtgccaacctctcagcaatgggatgaaactgcagtaggtgggtgcatcttgcccatcacttgcctaagaggaaatgctggacttgaacttgttcactgtaccttcccactccgcctagaatgtccacagccggagcagccccagaacacacaaggaggggttaactcctggctcctgaatgaccgtgtggaacagagctgccttctgtccatcatatgtgcagtggggcctccaaaggtttcagaagtgagcggccccgctctgctgccctctcattttcctgcagctggttttcataagtatttggacttttctatctctatcagatgttagttatcagcatgttttcctccatgtttcttctaagttgcagctgctttaaatctgctgtaggctaggaaatcagaccatcaagtttcctggaacagtgactaaagtaaacaggttctgagggaggcctgagaagaccacttgtgacaaaagtgggtgtgatttagcacataggttctgaggtgtccagagcttctcagaggctgttttgaccttattcttatttcctcttgttttccagactttggagtttgctgaaatgtaacctcagaataagtggggtatgactgccctctcctttgagggaaaagaaaaagtattttcaggccaggcacggtggctcatgcttataatcccagcactttgggaggctgaggtaggtggatcacttgggctcaagagtttgaggccagcctaggtgaaacactgtcacaacaaaaaatacaaaaattagccaggcatggtggcgcatgcctgtggtcccagctacttaggaggctgaggtgggaggattgcttgagcccaggaggttgaggctgcagtgatccatgatttcaccactgcgttccagcctgggcgataggaccagactgtgagtcaaaaaataaaagtattttcatccctccttattaacagcgaaattgtgacccaaagacaatactcatcaaaatccaaccagtttttagtgatctgagagtttgttttaaaaaaataatcctggccaggcacggtggctcatgcctgtaatcccagcactttgggaggctggggcaggcggattacctgaggtcaggagtttgagaccagccgggcaggccaacatggcaaaaccccatctctactaaaaatacaaaaattagctgggcgtggtggtacatgcctgtaatcccagctacttgggaggctgaggcaggagaatcgcttgaacctgggaggcggaggttgcagtgagctgagatcacgccattgcactccagcctgggcaacagagggagactctgtctcaaaaatagataaataaataaataaataaataaataaataaataaatccaactagtttttctatggaaataaacaagtttttaaaaaatttatataataaaggaataaagggccaagactagctaggacactattgaagaagaaagtgagaaataagatgggaggggcttgtcctaccataataaagaattattattagcaaagacagacaaagagaccatggggctgcacagaggacccagaggtgggccacatattgatgggaacttggactgtgatggaggtggttttactacacatcagcgggaaaataagacaccaatttgtacataataccagaacaactggctaacagatgcaaaatataaaactagattccttcctcacatcgtacccaaagatagactccggatatattttttaaaactaaatataaaaagccaaactttaaaacttaaaaaaaatctgcaagcaaatacaaccatgaacttgaagggggtgggtttcttaaataagatgagaaggacatattttataaaggaaaatgttgatgaatttgactaccttgaaattttaaacttctttatgatgaaaggtaccataaatatgaaaaggcaagatattggcaattcagtacaacttgtttgtgtccagaatacatcaataaaagaagaacaattcaagagaaacaggaaattcacagaagaggaaaccggaattgtcataaacaaatgaaaaatgctcaacttccctagtaattatgagaattcaaatcaaaataaagacttcatttcacacttatcagattggcaaaaattaaaaagcctaataacaccatattggtaaagatatggggaaatgagaagtcataagcggctggtgggaatacaaattggtagaagcttaaaatcttttatttgcaattccaaaatagaaaaactctgaaaactaagtttgctcccctaaatttggtttaaactcctttatgtatgtatgcatgtatgtatgtatgtatgtatgtatgtatgtatgtatgtatttttgagacgagtctcgctgtgtcacccaggctggagtgcagtggcgggatctcggctcactgcattctctacctcccgggttcaagagattctcctgcctcagcctcctggcaacctccaccacatctggctaatttttgtatttttagtagagaaggggttttgctatgttggccaggctggtctcgaactcctgacctcaggcgatccacccgcctgggcctcccaaaatgccgggatgacaggcgtgagccacagcgcccgtcctggtttaaactcactttgtgacaaaacctgatggcagcggcgggccgtccgccgcgctggggcgcgggcggcggtggcaggagcggctgctggagcagcagtggcggcgggtaccctgtgcccgcgtccccgaggcaaccgactgcgccgcccccaccctcgcgcggccgggcgggacgtgcctccagatcagggcctccggaccctggccccgcgtcgccgctcttgcccgctgctgccgccaggaggccgctgggaggaggcgaagctggggccgcattcggaagcccagcgccgtaagggagaggcggcgcctgccctaccaaaggtgcggagttcctgcgcctccggaggaggctctgcgcagggccgcccggggcagcgtccctggggtccacccctcatcggggtgaccgcgggcctgacacaacagacggctgggccctggcccacgatccgctcccggaggcgccctgccccgggccgtgcggcgagccgggcgaggggaactccaggctgcccctgagcgccggggccacggggctaggctcgtggagaggacgcccctgccccagacccggccccggcccagcgaggaccaggcgcccccgccccaggccgcgaggggtgcggctcgggcatcacgcttcacgtagcaggcgggagccgggagcggcagcagccgcccaagtccgggctgtggactcgggcccctctgcacttttgggggcccaggaaggtgctcgccttgtccttgcaggcttggaggtgcctgttcccattgcttggcctctgctagctcccggcccccgcacggatctcgaagtggggttggggcctagcccgagggctgtcacacccccgcctggtgtgcgcatgctaggggcagtgctgacacgctccactggtttcagatcaactttggagaatttggcgatagctagttaaagccgaagatgtgcatgcactgtgatctagcaaccatatgcctcgcaaaacaggccgggcgcggtgactcatgcctgtaatcccagcaatttgggaggctgaggcgggtggatcacttgagcccaggagttttgaaaccatcctcctggtcaacatggcaagacccctgtctacaaaaaatttaaaatttagctgggtgtggtggcatgcgcctgtagtctcagctacttgggaggctgaggtgggaggattgcttgaacctaggaagttgaggcttcagtgagctgtgattgtgccaatgcactccagcctgggtggcagagcaataccctgtctcaaaaggaaaaaacacccacacatcgatacaagaattttcactgcagtgctgtgtgtaataacgaaaatgggaacaaccaacagtccattaggaaaggaacaaataaataaacaggtttattcaaacaatgggaaactatggagcatttaaaattaacgaatcagatctacaatgtaataacacgggtaaatctcaaaaatgagtgaaaaagcaaatttcaaagagatttacacagtatgatagtatatatgtacatatattgttaatgtatgtgttatatttgtgtatgtaatcccaacactttaggaagctgaggtgcgtggatcacttgagaccaggaattcgagactagcctggccaacatggtgaaactccatctctactaaaaatataaaaattagccaggcgtggtggcttagacctgtaatctcagctaatttggaggctgaggcaagaggatcgcttcctgggcccccatattttatatacgtatgaaatatacatattatcgatatggtattgtatacattgatatatacctctgtagtaaatgtgtatgtatgtatgtgtatatatacatggtcaagaaggatctacactaacttgagacactggttatctatacaagggaaaatgggagggctttagatttatcagttttgggggtttttttgttttgttttttcgaaaaaagaaatagaaagcaaatgtggcaaaatgttgacatttgttaaacctgtgtgggcaagtacagaggtctatttagtattctttgtgccatattatattatattatattatattttttgagacagaatctcactctgtcacccaggctggaatgcagtggcacaatctcggctcactgcagtctctgcctccagggttcaagccatcctccttcctcagcctcccaagtagctgagattacaggcacctgccaccatccctggctaatttttgtatttttagtagagacaaggtttcaccatgttggccaggctggtcttgaactcctggcctcaagtgatctgcaagccttgaccccctgctcccccaaagtgctgggattacaggcatgagccgctgtgcccagcctgggtttgttattaaaggcagtttggctctcagtgcacccctttcccacgtgatgccttctgacatgttatgacatgaggccctccccagaggccaagcagatgcagtcccttgacctaggacttcccagcctctagaattgtaagaaataaattcttttctttataatttacccagtctctggtgttcagttatagcaataggaaacagatgaagacactgttttccacagtggctggaacattttacattccctccaactgcacaagggcttcactttcttcacattcttgtccacacttgttattttctgtttttgttttacagtagccattctgatgggtgtgaggtgatatctcattgtgtggcttaaaaaaaaaaacattacttttattggaaacaaataatgtgcctcaagatgttggcaacaagtcatgatatagacatatatttcatacagtgtgtttctccctttaattacattccagcaggaggtggaatacctccttggctatgaggagcataagtatttgatgggttgtgtaagttggtctcctcatacttgtacacacgccaagcatttcccctccaaagtatcatattcagaaagacaaagatcacagatacatttaggaatcccatgctggtcacagagccaaaataacacattattatgatttcttacaagcagaagttcctgaacaatattttgaccagtagttattttaatatctgcaagagcttttgcccaagcgagcttttgaagtgctcaccaatcgcaaaagatggcaacaagagtaatgacaaagccaatcatgggaagtttatgactaccctgatataggttcctgtaaccaacataaagcacgacagcaatgcagtacaggaagacagagactgcaaatgtaatggaattgtgcagaagcacagtcatctcctaggaggacttgactttccaatttatatcatacacattaatacctggaggtgactgaaatgatgcctgatttaacctgaatggataatcagaagtagctgtaatagtttcgtcagtaactgtaggaggacaattcacttgaatttctgtttgctcttaaaaacctccacaggtggcaaaagagaagatggaagccatctactccaggcccttgaggaagctgagcggctccctgagtagggttgaggtggatccagaaggcaacatcctctggaaggaaggagagtcaggatggtgggggcctcactatggttttgatttgcgtttccctaaagattagtgatgttgaacatcttcccaagtgcttattggccgcttgtttattttctttggagaaatgcctattcaagtcctttgcccatttttgaatcaggattgattttctatggtctagctgtagttctttatacactgtggatattgattccttatcagagctatgatttgaaaatattttctcccattctataggttgcttttttcactctgttgattatactctttgacacacccatggagaagattttaaagggcaggtagaagtcagacagtttgagcagcagcgtagtgaagagaaggcctttcaatcgaaggaaatagtctgtgcaaacacacagaggagagaaccgcaacatgcaggtagttgggtcttgctagtacactggtgaggggtaggaggtggggacaggtgagactggaggaaccacatgacagaggacggttctaggtccgccaagtagcaggacttcgttctaaggtggcactactcaaaagagtggtctgaggaccctggcccagcaccccctactaggagtttgttaaaaatgcaaattccggctgggatcctggctgatgcctgtaatcccagcacgttgccgagctgaggcgggaggattgcttgagtctaggagtttgagaccagcctgggcaacacagtgagaccccatctcaataaaaaaggataatttaaaaaatgcaaattcatggaggcccagttttgtcctgctgaatcagaatctccggggtggggccgggggatccgggttttaacctgcccccgggattattctgaggttcagtagagtttaagggaagtggaggaaccgccaaggggtcggctaaggttttggaaacatccttggtgagaaagacggcccgggttgttcttcaggccgggcaccctgggcttggctgcgtccccatcctcttccagccaccccgtccccacacgaccccgcctgagttctggccgccttccgacccctcggggcccgccctgcgccccagcctcctccccgccgtggggtccggggtcaggggcgcgcggctgcagtcaggcccacattcctcttacttcccgccattgtcctgggttcctgtggccgcgtctccacactcgctcccggccgccccacggtcccagggagtgatgactcatttcctttcctccgctgacatcatcgtgcccccagcgtggcccggccggggcggcggcctccgccctcccaggtctcctcccagcccctctcggcgagcgggcgcaggcgcggtgcggcccttctcggccggcagggggcgccggagcccgccggggcctctagggcctccccagccacggcccgggccggcgaagagggaggggcagagagccgccgcggtcccgctctcccggggagagcctggctgggagtcagagctctcacggtaacggatagggaagctgagttccgagccttgaccaaggcagcacagcccaccctgagaagtgggggactggaattcaggacgctcggccccaggcccgtggtttcccacagacttgcaggtgttaatcctcccgcaccccctggtatgtattttcagcacaaagtctgcagacaatattcccccgatttccatcacttgtgggccctgaagcgtggtcgcccctggaaccagcaggatccgagggccacttgggctccacctgggaagcacgtggagcctgcatttattgggcggcgctgcccccggctgacctggctgtgtcgggagatgcccctcaccctcgcatccaccccggcttcccagcacccactgctggtcctcaggacccgaccctgtcccctctgccttccctgtcaggtttcagggaggcagaggaactcactcagcctgaaaatttcagatatttcataagacctagagccacgtaagagtgcgtccctttaagacacatggaagaagtcatgcaaggccacacggtgagctagagctgaaatcatacctgtcctgcctcagacctgtcacctctcatgctgcccagataatgaatgcaaaatgctccacccagtgtctgacagtagtgtaagcactcaatgaatggtagtcattgtcattaggaagctagttgcctaacttctcagagcctcaggcttcttcatctgtaaaatggacgcagtagtacgataccttattgtgaggattaaatgagctcatgcatggaaggtacttacagcagtggtgtccagcaagcatgcaacagtccaccagcgcttgggctccatgaaaggggggttctgttgtctgtttcttgtttgtttgttttgttttgtttagacagggtcttactctgtcgcccaggctggagtgcagtggtgcgatcatggcttactgcagccttgacctccccaggctcaagagatcctcccatctcagcctcccaagtagctggtactacaggcaagtgctaccatgtctggctaatttttacattttttgtagagacagggcttcaccgtgttgaatcctgaccagactgtcaggctcgtctcaaactcctggtctcaagccatccacccgcctcagcttcccaaagtgttgggattacaggagtaagccaccgcacccggcccctgttgttgtcttttcttctttaattgacaaataaaatcttatatatttataatatacaacatgatgcttttatatatgtatacactatgtgtgtcactggaagggcaaagtgaaattaattaacatatatgcattattctgcatacgtgtatgtgtgttgtctttgtgtactactgtatctttagcacctaaaacagtgtctggcacaaagtaagaacccagtaagtggaaagaaggaagggagggagggaggaaggaaggaagggaggaaggaaggaaggaaggaaggaaggaaggaaaccaacctattattactgcctcagctgattttcctccaggatttaggcctgtcagagcagccctggtggaccgtagaggaagattcctgagggcctgtttgcttgagggctagagggctccctgggaagcagtcatcctgaggaaagagagttgaagcgcataagagcatttcaaggacagggcgaggagaaaagaggcatttggggtagagcctcctcggtgttcacaggagcactgtggaaagcagtggacgatttcaggaagatgccagaacaagcatcatcacagttaatcagtggtagcttcaggacaatctggtggccttgcacctgctttggacactgataatttggtggctttggttattggttttgcttttatttgttaaatttttatttacttatttagttatttgagatggagtctcgctttgtcgcccaggctggagtgcagtggtgcgatcttggctcactgcaacctccgcctcctgggttcaagtgattctcctgcctcaggctcccgagcaactagaattacaggcgcctgccaccacgcccagctggattttggttttgtttttaaatcagcattagctgtgagtggttgagtcctggggggcatccctcagaaggccgtgagacacctgctgggccttcccaggaaggtctgcaggaactgctggcacagagccagagaagccagttactgtgaggtggagggggggtctccctatgttgcccaggctggtcttgaacttcgggcctcaagcagtcctcctgcctcagcctcccacagtgctgggatggcctccttgtcgttcctcaccatgccctgctcactccaccttagcacctttgctgttccgtccatctgtaatctctcagaaacagccaagactcacttcctcactttttcagattttatctcaagtgtcacctactcagtggggccctccccaccccaccccattgaactcagaaaccctcacacctcctgacagcctgtctgccttctttgacttgtttccttccacagcacatggtctgcagaccccaccactccctactgcctcacaaccagtcagattcatatatttgctttgtttgctggacccctgagtaggccgcctttgcatttcttttccttttttttttttttctttgagacagcgtcttgctctgtcacccaggctagtgtgcagtggtgtaatctcggctcactgcaacctccacctcctgggttcaagcatttctcctgcctcagcctcctgagtagctgggattacaggcacctgccaccacccctggctaatttttgtatttttaggagagatggggtttcaccatgttggtcaggctggtcgcgaactcctgacctcatgatttgcccacctcagcctcccaaagtgctgggattacagacgtgagccaccatgtccagcctgcctttgcatttcataagcgagactcagagaaggtgactcctggagaaatccccttagcctcctctaccaggatggttttggattcctctccagccaggagttggaacatagtagcctgtgtcgtctaaaatcatgaggtcatacccaggtgccttccctttggttcttgacttgccccctattcttcatactcacctcctgaataatgtccacgtagttataagatgaggggagggagccagctggctgttccctctgccaggagcatcctgcctccttaaactgcctggtcagtacctgcttaaggcccctgatcctgcatcaccttctctgagaagccttccctgactactcccctgccctgccctgtccaccagccagcctgagctgaccacattactcccaggatggatgcctgtcagggcccccttccctctaggttggactgatttgctctgggtcagcttcccccgccagaccgtgggcttcgtgagggcagaggctgtgagttacttctctttgagtacctagggcttggctgatgtggtgctcaataaacgagttctgaaagtgtaaataaaagaatgaatgaattggctgggcatggtgcctcacgcctataatcccagcacttagggaggctgaggctggaggatcacttgagcccaagagttcaagaccagcctggacgacgtggtgaaaccccaactctacaaaaaatacatagattagcagggcatggtggtgtgtacctgtagtcctagctactcgggaggctgaggtgagaggatcagtttgagcccgggaggctgaggcttcagtgagcagacatcacaccattgtactccagcttgggcaccagagtgagacccaatctcaaaaaacaaaagcaaaaagacaaaaacccaaagaataaataaataaaaggaggaacggtggacagagggaaaaaaggaagggacttattaattaatttgctcctcaccttccgcacattcgcttgaaagagacctgttgctttaaatgccacccccaaggctgggagtttgtcaacccccacagaagaggaacgctgggctggggccagccctacagagactcatcgccattccacctctgaccatagcatcacacccagtttctgcttgttctgttttttgttgttgtaaattttatgattcaatatacatgcccaaaataatcaaaatcagaagttgacagtttgatgaattttcaacgtgagcagatccacgtaagcgcacccaaattaagaaagagaatgcaaacagctcctgccctgtgctgccttcaggcactatgctccctaaggctgacccttcttctaaccctagcagcattaattttcctgctttgtattttattttattgtattaatttaatttaattttatattatgtttttttattattttattttattttgagacagagtcttgctccattgcccaggctggagtgtagtggcgctatcttggctcactgcaacctctgcctcaacctctgcctcccaggtttaagtgattctcctgcctcagcctccagagtggctaggactaacaggcacacgccatcatgcctggctgatttttgtatttttagtagagacagggtttcaccatggtggccagtctggtctcgaactcctggcctcaagtgatccacctgcctcggcctcccaaagtgctgggattacaggcgtgagccaccgtgcccggcctactttattttattttattttgtgagataaggtcttgctctatcacccaggctggagtgcagtgatgtaatcacagctcactgcggcctccacctcctgggctcaagtgatcctcccagctcagactacaggcatgtgccaccacgcctggctgatttttttgtctttttgcagagacggagtctaattgtttcctaggctgatcttgaactcttgggctcaagcagtccacccgacttggcctcccaaagtgctgggattacaggtgtgagccaccgtgcctggctgtattttatataaatataacattacaatatatattcttttggctctaacttcttctggttaatgctgtgtacgtgagatttattcatgttgtggttcattcattctcattgctctataatatattccatggtataagtaagccacaatttctttattcattctgttgctgatggatgtttaagtgatttccatttgttggctattaagcatattgcttctgtgaccattcttgtacctgtcttgggaaacatatgtgtgtattcatgctgggtatgtacctagatgtggactgctgggtcagaggcaaggtatatgctcaacttagcagaaacttgccattttccaaagtgactggaacaattttcgcttccacgggccatgtatgagagttccggttgcttgtcgtgctcaccaatacttggccgtacctgtttttcatttgttcactttattttttgtgttgtatgtttttggccagctattctggtgggcggattgttccatttttgaccacatgctccttccccctggcagtctgctccagctctgtttctggtacattctgcaaaaccaacttctctggttcttgactcttgtcctatagttctttttgtttttgtttttagaggtggggcctcactctgttgcccaggttggagtgcagtggcatgatcatagctcacttcagccctgacctcctaggctcaagtgatcctcttgcctgagccttctgagtagctgggaccacaggcaggcaccaccacttctggcaaattttttttatttttatttttttagagatgaggtcttgctatgttgcccaggctggtctcaaactccctggctcaagcgatcctctagccttggcctcctgagtagctgggattacaggcataaaccaccatgccctgtgccttgcagtcttgctctagggtttgtcttcaaccctgcagacctgagacaggcctctcagctgctctcaagaacgcccttccatgagaggcattccagcctcaggtggcagctcctgcaggatatggaccccggggataaggatggggaagaggatgagggtgtcgggagctgtctccaaagcctgcgcaggcccttcccacaatctcatcttactcatttagccactttgtgggcccccatcttattatactcaaaacgttgggtagacataaagctaaatatacgtgctaaaactattaaactcttagaagaaaatagaggggaaaatattcactagattaggtttggaagtcattttttagctatgacatccaaagcataagcaacccaagaaacatttgataaattggacttcatcaaaatttaaaactttcatgcttcaagggacactgtgaaaagagtgaaaagacaacccacagaatgggagaaaatatttgcacatcataaatctgataaaggacttgtatttagaatagagaaagaacacttggaacttatatgttagtgcgaaagtaactgcggttttgccattaaaagtttgccattacctttaacagcaaaaccgcaattacttttgcactaatctagtaatgtgatctgatcaaagccaccagaagctggaggaggactgtggccctgctgacacttgggtttcaggcttgtagcctccagacctgtgggagaataaatgtcttttgtttcaagccacgaagtttgtagcaatggcagccctacgaaatgaatgcaggaaattacactgatgtagcaaaacgtttgaaagcctgtttccctaagtacgtgtgtgtgggtgtgggtgtgggggtgtgtgtgtgtgtgtgtgtgtccctgtccttgcatgtgtggcggctgctgccttcccctcactcccaacttccaccattcaaataacctcatctacctttcagcactttccatagaaacccagcctgccaggcctggtggctcacacctgtaatcccagcactttggccaaggcaggaggagcatttgagcccaggagtttgagaccagcctgggcaacacagtgaggctgtctctacaaaatatttgaaaaattagctgggcctagtggtgcatgcctgtagtcccagctacttggcaggaggatcacttgggcccaggagttggaggctgcagtgagctgtgattgtgccactgcactccagcctgggtgacagagcaagaccccatctctgaaaagaagaaaaagaaacccagccagcgccccagcagttctcccgcccgcagcccactataaagtccaacagttgggtgggccaacgcaacgttccttagtcatagaaagaggaggagaacgggaatgcccatctcactcttccctgtggaaatctttctcagggcatggctgcacggtcctcctaactgcccttgactcttccccctccctctttcccaacatccatgccatcactgttctgccttccagacaaccctggaatcagcccatttccctccatcctgctgcctctccttgggttctggccatacccctggtgtgctgcccgaccttccttcactcttcagcctaggagctctctggcagtgccattctgagtgtgtactcctgccatgccccttcagcacctccccttcactctaaggctgaagtcccaggtcccaataggggtctcccctgaatcctgccagcctcatcagtgcacaccgcctgggtctctcctctcaaaccacactgacctctgttcctcaaacttctccttgcctttgcacaggctgttttcccttcctccaacactttcccacccatccccatcacccagtgaactcttccttggccccttccttgtccccagcagacacttcctcagggaagccccgtgtgacctctaagtcaggattagctgatcctgctctgtccccatggctgggatcatccctagggcaacttcatcacacaccacttcacaattgttgggacctcacaagggcaatttccatgtgttgttcttgttacttactggactcttgactgccccaccttggaacatacaaggcaatccatagatactgtgaactttgttatttaattttatttttatttatttattttttagacagggtctcactttgttgcccaggctggagtgcagtggcaagaacatggctcactgcttcctcgatctccctggctcaattgatcctccccccttagcttaccaagtagctgggaccacaggcttgggccaccatgcccagctaatttttgtattttttgtagagacggagttttgccatgtcgccaggctggtctcgaactcctgagctcaagtgatctgcctgcctcagcctcccaaagtgttgggattacaggtgtgagccaccactccaggctccattatttaattaatgagggaagccatagtgggattattgactcattgtccaaattttaggagaagggtaatatgccacaagaacagatgatacgattaattttgctggaatatactattaactacatttattaagaaacttaaaagcttcaggagcatttaaacatgatattcatttattctacaaacatttgagcgtctactatgggtcagtgactaggaacacccatgtgaataagacagtgcctgtcctcaaaaaggtcatagtctgatgatctcattctgttgaatcgtacagtgacccactgaagtgagtactatcgatttgtattgattaggacatttttgttccaagtgacacaggactgctcaaacaggctttaaccaaaaagggaacagattggtttatgtgactgaaatgtcgaggggctgggtctggcttcaggcatggtgggtttctggatttgatagtgtctcccggaccatgccaccctgtctcttggttctttcctccttgagctggcaccgtgttgtcaccccgacagcggtgggttctcttctcatggtggccaggtggctgtagatttatatccccagagccccaaggccagtgggaaagtgaaaatctcttttccagcagctcctgcaggatcccagtcatccaccctgatgaccagctcagtaattgtccctgaggcaattactgtagccagaagaaagcaatgttcccagtggtttgaggaacacaccaaaagcttcatgtcctgaatgtggtatgggtccggcctgagagctggggaggggcggagcccaaaatgaaaacctacgggcgttgctgtaagagggtggagtggaggccagggaggcagaggacaaatgtttttattttttatttttatttctattttattttattttattttttattgtactttaaatactttagggtacatgtgcacaacgtgcaggtttgttacatatgtatacatgtgtgatgttggtgtgctgcacccatgaactcatcatttaacattaggtatatctcctaatgctatccctccccactagccccaccccacaactctcccttctttagaggcagggacatgaggcacagagagagggagagtaacaacctcaagccaaactgctggtgcctggcagagctaagactcgaaccctgctctgctgacttcaagtagcactttccacacagctgctcttcccagggagaggtctcagacacaggaaggaccctggagtccctactcagaggacttccttttattcgttatttttaaattttgtttatttatttttctgctgagacagagtctctgtcacccagactagagtgcagtggtgcaatctcagcttactgcaacctccacctcccaggttcaagcgattttcctgcctcagcctccccagtagctgagatttcaggtgcccaccactgtgcctggctaatttttatatctttagtagagacagggtttccccacgttggccaggctggtctcaaactcctggcctcaagtaatccatatgcctccgccttctaaagcgctggggttacaacatgagccaccgtgcctggcagaggcctttcttttaaataatgagatgttggtggaggctgtccttctcacaaactgggctttagtcaatggctctgagaaaggagagaactatactttttgccctggtagtcttctatcttttctttgaagaaaaattcctctccttcccagtcattccagcccttgccaaggatccttggagctccagacagagttgctgcttgacagatgaggtcagttcagtggcagctgagatctacggtgtcttacagagcaacgctgtgacctgcccaggggtcattgcaaattgttagtgcaggcctccccattctggtctccttcatctgcccattctgcctcccgtcctgcaggctggaaggcagacacagcagccaggaaaagcacaagacagtctggtgaccgagaaaaaaccaggtttccgtctggggctctgttgctggcctggggcagtcaggccttctcccggagggcttgggctctgagtgtcggctctgccctgccctccatcacaccctaagcataaactctctattccccatacatgaccattactgtctattccccatacatgaccatgtctgttcagcagcttcctcttgatgaattagtttcttttccgtttctttctctttctttctttctttctttctttctttctttctttctttctttctttctttctttctttttttttttttttgttgaggcagcatctcactctgttgcccaggctaaagggcagtggcacaatcatggctcattgcagccttgacctcctgggctcaagccatcctcccacctcagcctccagagcagctgggactacaggtgtttgccacaatgcctggctaatttttgtactttttgtagagacggggtttcgccgtattgcccaggctgttcttgaattcctgggctcaagtgatcctctcgccttggcctccaccactgtgcccagcctctgaattagtttcagtcacatttggtatgagattgaattgtgtccccaaaaaggcatgttcaagtcctaatacccagaacctgtgactatggccttttttgtaaatagggtctttgctgatatgatcaagttgaaatgaggttacactggattagttagaccctaaatccagtgattagtgtccttataacagggaaatttggacacagacactcacagtctggagaaagaggagaaaaaaacaaacaaacaaaaacaaaaaaagagagagacagcacagagaaaagatgatgggaagccacaacccagggagaaggctgcatgaagatggaggcagagactgcagtgatgcatctgtgagttaaggactgccaaagatcaccacaaccccagtgagctagaaggagcaaggaagggtcctctcccagagccttcagagaaggtatggccctgccagcaccttgattttgaacttccagcctctggaactataagataataaatttctcttgttttaagcttctcagcttgtggtaatttgttgccgcagccccaggaaatgaatacaagggtagagagaaggttaacaaaatcgtgcatgtcacaaggaaccataaaaaggccgagacaatgctgggctcagataatggcttgttcacttctattattttatttatttatttttgagacagggtctggctctgtcacccaggctggagtgcagtggtgtgatcttggctcactgcaatctccgcctcccaggttcaagcgattcttgtgcttcagcctcctgagtagctgggattacaggcatgcacaatcactcctcgataacttttgtatttttggtagagatggggtttcactgtgttgaccaggctggtctcaaattcctggcctcaagtgatccgcctgcctcgacctcacaaagtgctgggattacaggcgtgagctaccgtgcccggcccacttctattattattcttttttagacagggtcttgctctgtcacccaagttgaagtatagtggcataatcacagctcactgcagcctcgacttcccaggctccagtaattctcccaccttagccttccaaggagctgggacaacaggcacatgtcaccacgcatggctagtttttgtatctttggtagagacggggttttgccatgttgcctaggctggtctcaaacccctgaactcaagtgatccgcccgcctcagcctcccaaagtgctgggattacagatgtgagccactgcgcccggccttgttcctttcttagctgcatgaacttggaaaggcgacctcaccttccatagcctgaaggtctacagagtggttgtccataaatattaggagctggctagggcccttgcctggatgcgggggaagatggacaccatcctcaaacacttgaaggctgtcatgaggacaaggcattcaacatattcttctatgttttaagcacctctggggagaaattaaactgaggaagaataggactaaatcagggaagaccttcctgttagtgagacctgcccagtggtggccgggagaggtcatgagctctctgtgactcgaggagatgacacagaggctaaaggactgattgtgggtcagtgagaaagtcacccaccacccagggatgactgttatatgacagagccaggatttaaccctgagctgcctgacttcaaagaccattttcttaacagttagcctcacctttctgaactgttaaatgggtgggaacgtggtgaaaattcaatgtgtgaggtccttcctagcgctaaaattttctttttcttatgaaattctccacgttttagcatcctctagtttcttctgcaggttgtaggaaggttggttatttggaaaccagaacagtttcctaaagaaacaagtccatgttcagttctcagacctcgcttggagattcataactcaccaggggcctgaaccaaagccccatctcccccagctctgaacccttattagggactccctaggccaggctccatcttggggctgacttaccatctcgcccacgctctccccttccatgtcacagtgacccactgccccagtttacccaggactgacgggtttcctgggacataggactttcagtgcccaagccaggaaagccctggacaagctgggaggggctgatcaccctacttcgtgatgagcccatagcagaggccctgactgggctgcaggcagatgtggaaatcctggagtggatctgcaggcagaagacgaagtagccgtgtatgtgtgttttccaccagctctgagacacaggacccaaatcgctctgctttggggcctggtgacaagtgcagcacagacttggagagaagagacttctaacttcatactaaacatggcttggccactagcaaggcctgcagggccagcagcactatgaggcggggcagctttcggacgtcacgactgcaggcctttatacaagtaccagccttcctggggcaccagtggcctggcgggaaggaggcactgccctcacatagctcctaaaacagctgagtcagtgaggggttctgtgggggaagtgggggaggtttgcctgagatacattcaggagcgcctggctgacaaggtagggggagaaccctgcaggctggggcctgggctggtgaaaggggaggagacctgctggcagagcctggctgaagccaccgtctcagaggctgtggagtctcagttacaatgtcagttccgccaggcctctgaaggcagacacaggacctcctccttgccttctctttctcccccacttccaggcagtctagagcccggtggagtctcctgtcaggacacctccagaatgcttccagtcctttccctgaccactgcccgctcggcacaggccctgtgcaatatcctaaactgctgagctcctgacacccttcctgccagcctcatcccccgccctcttcccgtcatgtgccaagccccagccactgtgcagccctgctttttccagaggtgcaggctgcaggcctctcgccttcgaatctttgcataagtgggatcctcttcctgaatgcccgctcaccttcttgacttggctaacttctactcaacttagaagatttattacaggtgtgtattagtccgtcctcaccctgctataaagaactacctgagactgggtaattcataaagaaaagaagtttaattgactcacagttccacaggctgtacagaaagcatggctacggaggcctcaggaaacttacaatcatggcagaaggcaaaggggaagcaacacatcttcacatggtggcaggagagagagagcaaagggggaagtgctacacacttttaaacaaccagatcttgtgagaactccaccaccagaacagcaggggggaagtctgcccacatgattcaattacctcccccataggctcctccttcaacacatagggattacaattcgaaatgagacttgggtggggacacagagccaaatcatatcaaggtgccacctcctccagaaggccctccttcatgtccttcatctctgtccccacagcatcctgggcttactgctgtgcaccagctcataaattcatgcactaaccacagacagcgtctgtctcctaaccagcctgggagttgcctgaaggcagggaacaggtttcttacttctgtattgccagcatctggcgaagagtaggtccataatgcagaatgaatgaaggaatgagtgaattaacacattgtcctgtttagtcctcatgactctgggatccctgttctggggctttgggacctcagaagcaaagagaaagaggaggaccatgactccccagcttactacctcctgccttaccatggctttgctagtccctgatgaccttgagccctagccaggtcaaacaggggtcacgtgtaggactaatgtgagttgggggaagttggtacaatctgccagcccagtagtgtggaaggggactgagggcctgacagtgttgcatgccagaacaaagcccatgcaaagaattgaggctttttgcccttttgggcacctggttaggttaagaagaggggaaaggctgaagcagagggaggacagaaggatcaggaagtgcgaaggagaccccctacattgtgagagccaggcagggtcctagcggtcgtctgaatggctaaggtgtccctccgttgtgactagataatatcagtccactcctcctgggctgagtgagaaactgcctgcctcctccccactcccttcctccagcagccttgctcagaggccctgcagccactgccatatctatctcagtctctcaatagctctgtgaagggtgactgtgtgattcccacttacaaatgatgaagacttctcccccaccttcttttgatttatttgaaaattctttagaattccattttaattgacttattggttctgcatatcttttgtggtttctctaagaattacaatgtaattctttgggaggccagggtggggattgctttgagctcaggagtatgagaccagcctgggaaacatggtgaaaccccatctctaccaaaaaaaacatatatacatatacaaaaattctatatacacaaaaattagccaggcatggtggcttgtgcctgtagtcccagctactcgggaggctgcagctggagaatcacctgagcccaggaagcggaggtttcagtgatctaagattgtgccactgcacaccagtttggatgacagagtgagaccctgtctcgaaaacagcaacaaatatagtatatatccttaacttttcacagtcaacttggggttcatcttgcatgatttcacatgctatttccagctcatatttgctaccctcctgtctgtcttttcttttaccgttacccatatttgctacactcctgtctgtctttccttttctttcttttattttttgagatggagtttcgctcctgttgcccagtagagtgcaatggcacgatcttggctcacctcaacctccacctcccgggttcaagcgattctactaccttagccttctgagtagctgggattacaggcgtgtgccaccacaccccgctaattttgtatttttagtagagacagggtttccccatgttggtcaggctggtcttgaactcccaacctcaggtgatccgcccaccttggcctcccaaagtgctgggattacaggcatgagctaccatgctggccctttttttaaaatagagatggtgttcattacgttgctcaggctggtctcgaactcctgatctcaagatatcctccagcctcagcctcccaaaatactaggataacaggcattagccaccacacctggctgtgtctgtcctttatgctacaactgtcagatgcattatttctatatactctataaactctccaagacaatattatagttttttcttttcttttttctctctttctttttttttttgaaacaaggtctcactctgtcacgcaggctggagtgcagtggtgcaatcacagctcactgcagactcaacctcccagactcaagcaatcctcccacctcagcctcctaagtagctgggactacaggtatgtgccaccatgcctggctaatttttgcattttttgttatttttttctttaaaacagtcatatgtctttaaataaattaaaaataaaataatcttatatagttaccaggatatttaccattttctatacttttcattcctttccgaaaattttcacgtggtatcatttcccttctgcctgaagaactccctttggcatgtcttatgatgcaggactgcagatgataaattctcttcactttttcccctctaatgtctttatttgattttcattcctgaaggaatgattatttcactggatatagaattttatatggaaatattgaatttcattcatcattttaaaatgttgttccactatcttctgaccccatagtttttgaatgaaaagtcagcagtcaagcaaattactagtgctacctaggtagtgtgttgttttacactgtcttcttttctttctttctttctttctttttttctttctttcttttgagacagagttttgctctgtcaccaagacacctccagggttcaagccattgtcctacctcagcctcctgagtagctgagattacaggcatgcaccaccacacccggctaattttgtatttttagtagagacagggtttcaccatgttggtcaggctggtctcaaactcctggcctcagatgatccgcccacttcagccttccaaagtgctgggattacaggcatgagccatcgtgcctggctacactgtctactttcaacattttctctttttatttattattattattttttgagacagaatcttgctctgttgcccaggctgcagtgcagtggcatgatctcagctcactgcaacctctgcctcccacgtccaagcaattctcatgcctcagcctcccaagtagctgggattactggcatgagccactacggccagcctcaacattttatctttatctttggttttcagatattggtttgacctgatatttcttggcacagttttctttttctttcttcctttttttaaatttttttgtacagacagaggtcttagtatgtttttggccaggcttgtctcgaactcctggcctcaaatgatccttctgcctcagcctcccaaagtgctggggttacacaggtgtgagctactgtgcctggtcatttaaaaaaattttatcctggttggggtttggttatcttcttgaaatttgaaatttatatctttatcaaatttaggaagtatttgaccattttttccttcaaatattttattctgcctcattctcatttctctccttctaggactccaattacatgtatgtcagaccatataataatatccttttgtatttttggtgtcaggacctacaggtccctgagacattgtttgatttaattgtttttaacatttttttctctgtattcttcagattgtgtaattcctattcatctatcttcgagttcaccaactagtttctattcctctccattctgttgttcaacccatctagtgaattttttcctcctgagctgtgacaccaaggatattgtatatttctgttctcatatttctatttgttcctccctatacctctccattactacaatttggttctttaaaaaaaaaaatttctccagcctggccagcatgatgaaaccccatccctactaaaaatataaaaattagctgggcatggtgatgggtgcctgtaatcccagctactcaggaggctgaggcgggaaaattgcttgaacccggggggcagaggttgcagtgagccgagatactgccactgcactctagcctgggcaacagagggagactccatctcgaaaaaaaaattctatttctttgctgagattttctaccttttcatttagccatacatcagaaggctataattttaataaagtacaatttgtgaattttttttcatagatcatactttgtttgtttgtttgtttgagacagagtttcactctgttgcccaggctagagtgcagtggtgtgatctcggctcactacagcctctgcttccccatttcaagtgactctcatacctcagcctcccgagtagctggaattacaggtgtgcaccaccaggcccagctaattttttctatttttagtagagatggggtttcactgtgttgccaaggctagtcttgaactcttggcctcaaatgatccacccaccagagcctcccaaagtgttggaattacaggcatgaccaccacacccagcctccatagatcatacttttgatgttatatttaaaaactcatcaccaaaaccaagatttatcagattttctcttatgttactgatatggtttggctgtattcccacccaaatctcatcttgaattcccatgtattgtgggagggatccagtgggaggtaattgaatcatgggggcaagtctttcccatgctattctcatgatagtgaataagtctcatgagatctcatggtttttaaaagaggaattctcctgcacaagctctctcctctttgcttgccaatatccatgtaagatgtgacttgctcctccttgccttccaccgtgattgtgaggcttcctcagccacatgggactgtaagtccaattaaaactttttcttttgtaaattgctcagtctcaggtatgtccttatcagcagcatgaaaacagactaatacagtaaattggtaccagtagagtggggtgctgctgaaaagatacctgaaaatgtggaagctactttggaacttggtagcagacagaggttggaacagtttggagggctcagaagaagacaggaaaagtttggaactccctagggacttgtagaatggcatcaacaaaatgctgataatgatatgcacaatgaaatccaggctgaggtggtctcagatggagatgaggaacttggtgggaactggagcaaaggtgactcttgttatgttttagcaaagagactggtggcattttgcccttgccctagagatttgtgtaaatttgaacttgagggagatgatggtatctagcagaagaaatttctaagtagcaaaacattcaagaggtgacttgggtgctgttaaaggtgttcagttttaaaagggaagcagagaataaaagttcagaaaatttgcagcctgatcaaatgtggtaggaaagaaaatcccatgttctaaggagaatttcaagctggctgcagaaatttgcataagtaacaaggagccaaatgttaaccaccaaaacaatggggaaaatgtctccagggtgtcagagaccttcatggcagcccctcccatcacaggcccaaaggtttaggaggaaaaaatggttttgtgggctgggcccagggtccctctgctgtgtgcagtctaggaacttggtgccctgcatcccagctgctccagctgtgactaaaaagggccaaggtacagctcaggctgttgcttcagagggtggaagccccaagccttggcagcttccacatggtgtagagcctgtggttacacagaaagtcaagaattgaggtttgtaaacctccccctagatttcagaggatgtatggaaatgcctcgatgtccatgcaaaaatttgtaagggcagggccctcatggagaacctctgctagggcagtgcagagggaaatgtggagtcagagcccccacacagagtccctactggggcactgcatagtggagctgtgagaaaagagttaccatcctccagaccccagaatgatagatccactgacagctttcacagtgcacctggaaaagccacagacactcaacaccagcccgtgaaagcagacaggaggggggctataccctgcaaagccacaggagcagaactgcccaagaccataggaacccacctcttgcatcagtgtgacccagatgtgagacatggagtcaaaggagatcattttggagctttgagatttgactgccctgttgtatttcagacttctatgggggcctgtagcccctttgttttagacaatttctttcatgtggagtggctgtatttacccaatacctgtacccccattgtatctaggaagtaactaacttgcttttgattttacaggcttataggtggaagggacttgtctccaatgaactttggatggtgggcttctgagttaatgctgaaatgagttaagactttgggggactgttgggaaggcatgattggttttgaaatgtgaggatgcaagatttgggaatggcctggggcagaatgatatggtttggctctgtccccacccaaatctcatattgaattcccgtgtgttgtgggagggacccagtcagaggtacctgaatcatggcggcaagcctttcccatgctgttctcatgatagtgaataagtctcatgagatctgatggttttaaaaagaggaattcccctgcacgagctccctctctttgcctgccaccatccacgtaacttgtgacttgctcctcctcgccttctgccatgattctgaggctttcccagccatgtggaactgtaagtccaattaaacctctttcttttgtaaactgcccagtttttatctttatcagcagcatgaatacaaatacagttagcttctagaggttttataatttttgcattgtacatttagctgtatgatccattttcagttagtatttgtaggagcaagatttgtgtgtagattccttttttttttttttttttttttttgcatgtgcacatccagttgttccagcatcatttgttgaacaggctctcccttctccattgaattgctttgttcctttggtgtgggtctatttctgggctcttcattctgttccattgatccatgggtctgttgttttgtcagttccatgctgtcttgatttctatggctttgtagtaagtcttggagtcagggggtgtcagtcctccagctttatagttgttttgtgctttcatttttggaaggttatcaattattgactcaatttctttaatagatataggcttatcaagattattgtttcttgtgtgagttttggtagtttatatctttcaaggaattggcctatttcatctaggttatcaaatttatggcaacagttgttcgtgatattcctttatcatccttttaatatccatgggatcagtattgatgacccctctttaacttctgatacagtagtcccccattgttagtggctcaatttctgtgaactttagttatctgtggtcaacaagagcctaaaaatattaaatggaaaattccagaaataaacaattcataagttttaaattatgaatttatgcaccctttttagtatcataatgaaatttcgcgttgtcctgctccatccagcccagctccatcccttttgtccaacatatgcatgctgtgtatgccacctgcctgttagtcattgacatcatttgctcccgacatgctgtcatcaatgtcagcatggtttgatgatccaggatcacctgaagtagatgatcctccttctgatatattgtggcctaacaatataggccaatgttgaaatggccactgcaaaattataactgaggcagtgaaaagagatctgacctggccgggtgctgtggctcatgcctgtaatcccagaattctgggaggccgaggtgagggaatcacctgaggtcaggggttcaagaccagcctggccaacatagtgaaaccccgtctctagtaaaaatacaaaaactagccaggcgtagtggtgcatgccagtagtcccagctactcagaaggctgaggcaggagaattgcttgaaccaagaaggctgaagttgcagtgagctgagatcctgccactgcactccagcctgggcgacaaagtgaaactccatctcaaaaaaaaagaaagagatctgacctaaccaattccatcttacttttaacctccaagctatccttgttcattcctgaccataggacaaactattaataactttattaataactttgggaggaacttagtttacagtttaaaacaaagacaataacagccttttcccaaaacaaagcctcttcttggctggggactagactgcctttgtaggactaataaattagccgaaagattagaaattatggtttaggagtcatgcagctggaagctacaagattctgaccatccccaaagaactactggggaaattatcaccattgtaaaacctgagatcagtgcttgtgatattttgcaggtcagctggcaccacccagattcataaactgagtcatctgatcttatggccccaacccaggaactgactcagcgttaagaggacagctttggccctgttttgtttgtttttttgtttttttgagacagggtctcactctgtcacccaggctggagtgcagtgacacgatctcggcttactgctacctctacctcccaggctaaaggcatcctcctgccttagcctctggagtagctgggactacaggtgtgagccaacatgcctagctaatttttgcattttttgtagagatggggttttgccatgttgcctaagctggtctcaaacttctgagctcaatcaatcagtctgcctcagccttccaaagtgctgggactataggcatgaaccaccactgcctggccctatgatttcatctctgacccaaccaatcagcactcccaacttactggttctccacccaccaaattatccttaaaaactctgatccctgaatgctcaggaagactgattagagtaataataaaactccagtttccagcacagccggctgtgtgaattactctttctctattgcaattcctctgtctggataaattggctctctgtaggcagcaggtaaggtgagctcactgggcagttacaatgcctacatcattcacttcacttcatcttgttgtataagcattttatcatgttacatcatcacaagaagaaaaaggatgggcacagtacaataagatattttgagaggaaaagagaaagagagaacatattcacatactttttattccagtatattgttataattgtcctattttattattagttctattttattattattattattatattattcttactgtgcctaatttataaatgaaactttgtcataagtaggtacatacaggaaagacatagtatatgcagggtttgatactaccgcctattttaggtacacttcaggggttttggaacatatcccttgccattaagaggggactactgtattcgtaatttgtgtcttctgtctttcttagttagcctggatgttggttcatcatttttattgatcttttaaaagaacaagatttagattttattttctctatttatttcctgtttacagttttgttggtttctgctctaatttttattattccttttcctctgcttgctctgagattaaattgccccttttctctagttttttaaggggaaaacttaggttattaattttagatctttcttttttaaaatatatgcatttaatgatataaatttccctctaagcattgctttcacggcattcaacaaattttgaagatttgtattttcattttcattttctttttttttgaaacagtgtcatgctctgtcacacaggctggagtacatcggcacgatcatggctcactgtagtaacctcaaactcccgggctcaagtgatcctcccagctcagcctcccgagtagctgggactataggctttcaccaccatacttggctaattttttctatttttttcgtagagataggtctcactttgttgcccaggctggtctcgaactcttgggctcaagcacttcaccttcctcagcctcccaaattgctgggattataggcgtgaggcaccatgcccagcctcattttcatatattaaaaatatttaaaaatttctcctgagacttcttctttgacctgtgtgttacttagaagtgtgttgtttaatctccaaacattttgggattttccagctatcttgctgttactgatttctagtttagttctgttgtgttttgagaacatatttatacaggaacaggattctatcctggacattgttcatgttacgctgtagaggctctggtttctgttagtcctccgaaacatgttgatttctttctttttattaggcaattaacttcaaactctgctcttcggtggcagctcaaacctcagttcagttattttcctctgctaaagtatttttcatgcatgtgtggttcagggagcagtgagagatttgggcagagtttacagatgggatctggagccaccccctttccgagcctttcctttatggcactccccacttcactttccagtggctgtggttgctctaaactttgtactctgattctttaggccagaaagaccgcaggttccccaagtgtgctctgctgactgcagcgcaccttcaagatcaaagccagaaaaacagataactcaccatatgtcatgcccttcttccaagtgttgactcccagccagggcctacttgcttttattcactcttcagtgcctcgcgttggttttgggtttgttttgctttttcgttttgttttgtttttgtattttgtcaacactttctatctgtgggatggtcaattcagtaggatcttagttctcgtggaagagaaatcccccaacccaagtcatagaaaggtaacgtcactgacctgtggccactcagctagcaaattgaacgggtattccaacccaggactaagcaacaccagtctcctccgcccccaaccccacatactttttattatgtggatctgtcttccatctcttatttgtcaaaagtcccagaactacttactctgacttttctctttgcataaaatccatccagatttaggaagaagttttatttattgccttttgtgcattgtctctcctgtgaaaggatgatgattaaagtgcctcggctttgaagttaaaaatacctgtgttcaaatcctgcctctgatatatatgtgatcttggacaggtcgttccagtttccttatctgtaaaatgggggaaacaatagtattgacctcaaaaaatggtggtgaagattaaatgagatatttcacatgaagctcaaagaacggtgactgacctccagtaagcagtcaataaatgagacctcaggggtttttcctactctgaggtaggggagtactcacagtgggatgctccatcagatatttttccaagaggagggtacatcaggggcctgagcccaggacactgtttgagaggctggtcctcttgggatgccagccttattaagctggggctgctgtcatgtcaaatggagtagcacaggagcctagagtggtccatgtttttcggggaaagaaacccaagcccagagagattcagctcccatctgagatctgtgcagagctgggagtgcagcccagctcccctgagctctgcttccaaaatcaatggtatttttcttctgttgaatgcccatgttcctcaccgggggagcttcgggtgcagggcctgggcgcagggtgggtgtgggtggctctcagaggccagggggcccaagaggaggagctgtgagtactgccatcacagaaggtggatgaggaggagatttctgttttatttttctccagcaggctggaacgatttctagaaggaacacaaagagaggcggagaagccactgaagaaagaaagaaaggagtagaggctgggagcagggggcggcgtggggaatgcaaaggaggaagaggggagtggctgctgctggccggagccggcgtctctggttttggtctggccgtgggccagcaggcagcggacagcacagcacgacgggcttggagagctggcagggcgctgcgacagaaagaggacgccggtcagggtgctgggggaggggaccctctgcccacccaaccccgcctggccaaggaaatgtccgtgtagtgagcagtgaccacatgatgccctttcacccgcctcacatgtttaattaaaaaaacagaaaaacaacctccttctagacagtcttatggtctctgtttttagatggtgtcacaaggctcagagagggtaaatgaagagcccgaggtcacccagcttgtaggtagcagagcggggatgctcctcaccctgcacggagcagcctgtagcatcataagctgttgcttgccctgacgtggggagccagggggatggcggacttctcaggttcgtttctctgcccacacctggcaggctgtccctgaaagctgtcctctttcatcatttattcagccattcatccattcattcctgagcattcgaggctgcgtgctgaaccctgggggaccacagtgaacaagctagataccacccttcctgcgaagagctcgaggccagtgggggtccctaaggagagccgggaacatcaaacctgcggattgggagtaaatattaaatccagttcctctccccgatttacatgcacacacacgcacccgcacagtcccttcatcttctgagtgtcatgggaacggggacttctagccctcggcggtggccagcagcactggcagccgcccagccgcaaggggacgctgtgagggcagcgagcaggattccctaggccctcgccccctggtggcggcagcggctcctgctctgctcaccacgcccctcggtgatttctggccctcccccgccccggttgagcctcttgggggcctcttgggtcaccacttctctcccttcctgttccagccctgtggggagggcctgttggccttcacctaggccatgccctggtgttgccacaaagcgccttggaggccgtatctcaccagccggcaggaggtccctgcatcaggcctgggcctcagacacattctctcctgtgatcctctagccagcctctcccccgtccccccttctgatgagccaaaggttctgcgccatgcatgctcaagctgggactgccgctgtcctggacagagaccagctctaaatcaggcaatttagagccaggcgtggtggcctgcgcctatggtcccagcactttgggaggcccaggcaggaggattgctagagcccagtagttcaaccagcctgggcaacatggggagaacctgtcctacaaaaatgaaaataaaaatattagccaggcgtggtggccagcacctgtagttccagttactcgggaagctgagatgggaggattgctggagcctgggagttggaggctgcagttagccgagattgcaccgctgcacaccagcttgggcaaccaagcaagatcctatctcaaaaaatagacaaattttaaaaatcaggcagtttaggtgagactcaactgccagtcagctgaacttgaagctaaggctgtcttcctcaagttgatctcttttctgaatggcaaatcctggggaaagcaagggagcagtggatttggatcttttagccttctgcggtccagggatccgagtttaggggaggtaaaaggaagacagcagacgcagcaattgcatgccaggcactgtgctgctggagctcctcaaacggtttctcagtcctgacaatgactctacagtgggacttattttctgtcttttacagaggaataaatggaaactcagagaggttaagtaacttgcccaagggcacacagctaggaagtggcagatgtgggattccagcatcagctcctgcccctcaccacattgcagtggcttctggttctcccgtcccactctctgcactctacagacagcaccgtgccctcctcctccctgtctccatgctattggacattcctcctcatcttctcctccacttccctgcagacagtcagggccaccttgccccttagtactagtgagggtttgaaagagaagcacagcacattggggccaccaacaggctaggactctatggtctaggtgactgcaaaacagagctatctggatagatgaaatgacctctccctgaaccacatggcccgagctccagaccagaaatgagctaccgatgcttgagagagagccaggcacagagaaaaaaagctagagggatgctttggaagatgagatgctctgatgggtgccaggggcttcgcatgtgattgggaggccagatttctcaccacccatttagcctcagacacaggctgctttcagccagtgttataagtagctgggaatataaaagttgggcagggagagcagaatccagcttggtcctgggctgggaaacatggattgggggtggggggatagtggctggtctggtaccaggcttatggtttgctggaaagatctgtctcctccagcaacagctgtgagagagagctgggttgtgaactaccctgcaggggaagcctccatgggaccctgggattcacacgcaccctgctgtgggtacccaagggtacctaactccattctagatgtcaatggatcctttgcaaaggttagggtgctctgagacctctgctgaagggaaggaaactcacatgcattgagcatcaactccgtgttgggcactgggcaggtcatgatgccatcactgaaataaaggcatcaatagccaccacatcttgagcatctgctacatcaggaagcgtgttaagcactttgttgtgttatgattgctgacatcaacagtaacacagtaaccgtagctacaacttcttttttttttctttctttttttttttttttttgagatggacttttgctcttgttgcccaggctggagtgcaatggtgcgatctcggctcaccgcaacctccacctcccaggtctaagcaattctcctgcctcagcctccctagtagctgggattgcaggcgtgcaccaccacgcccagctaattttgtatttttagtagagacagggtttctccatgttggtcagactggtctcaaactcccaacctcaggtgattggcccgccttggcctcccaaagtgctgggattacaggggtgagccactgcacccggccttttttttttttttttttttttaataaagacagggtcttactttgttgcccagaccggaatgcagtgccacaatcttggctcactgcaacctccaccttctgggttcaagcgattctcctgcctcagactccggagcagctgaaattataggtatgcaccactgcgcccagctaattttttttattttcagtagagatggggtttctccattttggccaggctggtctcaaactcctggcctcaagtgattcacctgccttggcctcccaaagtgctgtgattacaggtgtgagctgccatgcccagtcagtaactacaacttcttgaacatcttttatgctttaggcactggcttgggctttacagatcattattaccatcatcaccgtcatcatcatcaccatcagactactgacaactgctgtgtttggcacttattagagacccttatgttgtctagtttaacttgattcttaaatccaccatgtgaaggaagtattcttaccccattttgcagatgaggaaactgaggcacacagaggttaaatgacttgcccaaaatcatttaactttgaattcaggtctatgactgcaaagccttaactcttcccaccatatgtcccttcctaaggaagcagatgctaaggaatgttcattggctgaatgaatgaacaagcaaagaaacgcagctgtccgaggtgatgtgtggaatttccaagccccaggaggttaagcgggttgttgaaggtcgcagagccagacagcagtgaggtaagtaaggagtcccggctctggtctcagtgcaggcttccctcacaaacctccttgctactttgagcagaagcaaccttgttttggcagctgttttgcccttactcatgcctgggataacagtggactcccgatttgcatgccaactcatttcctacccttcagggagctgggcaggaggcccagcactgggtcctgccaatccccaggcgagctatcaatggcaactgccagctagtcacgggagagtcatttcattctctctccctttttctctaagtccttccagcaggaggactctcagagttcctgctggatgagtaggtatcccctggggccgcaaggctggacaggcaccttggacctccctatccaagcctcctggggcttccaccgaggatcaatatgagggtgtggagacagttttgtggccctgggcaaattgaagtcccttctccaggtctcagtttttacgtatctcccaaatgggggattgggtgagctggccctccaggtctgcactctgtttcctgggctcttctctaatgagcctgcctgtgacattgtgcagttcccccagcctcactcttgctgggaacaaggcccaatttggaccttctaccagggtgggaaatgagtcgactgggaaattagagactgctgtgaatccaatcatgagtaagggtgaaattgatgccaaaagtttctgcttgaagcagcaaggggttttgtgagagaaatcctgagctgaaagccagaggaggcaggggggtctctgacataggttatctgctgctgatcaggggttccctggtggcaggtgacagaaacccaattcaagccagcttgaaaaaagatgcatttgttggcccacagaactatgcagaataggcaagatttaaacaccacccagcaagcactctccccttcctccttaacaacagaacccctctattgttaagggatggtgaggtgtgtttcacagatttccctgcacatgggaatggccaatgagctagaaatggaaatctttgagtggggcttctaggatgctctttaaagggctgacccctgcctcttccctcatctttctgcctggaaggtaggcttgaggactggtgctggggcagccattttgaggctaagataatcatcttgggctaagagaatcccaaagaacttagccctgacactgaaccaacacgagcaactgcctgtttctgaagttctcttcatgcgaaaagccactgtggtcaggcttctgttactcatggctcaattcagtttccaggtgatacaccttcattccttgggactggcttcttcactggaagaaaatatgtctccaggagctctgggcttacttcctcagagctttatagccaaagaggaaaaagagtgtctccccctgcttcaatttgaaaactcatggagaagaactctgattggcccagcttgggtcatgtgcccctcccttggtgacactgaagctagaaaatgaggccctttgattgactcaacttgggtcacatgacctccctgtggctgagaggatggggtctgttgaaggagaaagggaaaagggatgctggataggtaaacagaacagtgcttggagctgcacctgactctgactccatcggttgctgtgcctctggctttcagccatgttagcaccacccagccagaggatgttgggtcaatttgctcaggaccccgagcaaagtctatattccttccagcagggttattgctactattgaatgatggggttagatatattaagtgcctaccatcttgccaggcacagagatagtgtccttcccattcctgtgggtgggaagagccctgagattctctcctgggctctatctgtcttgatgtgcccccatcagagggaagagcccctcccatccttacctaagcccctggggattcagggccaggaagctccccttggggggagtccagggaactgcccaacagtcaagagatgggcctgctcttgctgggtgctaaccaggtgatcttgggtgactcgctcagcgcatcaagtctcagtgttttgtctgcaaatgcggacgtgctgtggtgggcgcaccgtggtaagggctaacagacatgctgtgtggagcccactaagcacaatgcctgtcactcagggaagtcccactaaatatttgctattaataattggtctcggtaatagttagactcaggcttggccaccacagaaagcatagccccagagtggccctgagtggaagggaggtttttgtttgtaccctccagcctggtgaggatggaggaggccttctctggctctcgcagcctggataccagatggcatgtgatctggcctgtccctgtccacaggaagcaagtgatgaagaagaggttgaaagctcttagtgctgccaaagcagaggggttgtagggaggagactcagaagagatgcagggtgtgggccactgtcactcacccactgagggcatcctctgtcggccacatcaccactccaggtaggccagccctgctcttgcacaggttggctgattgggagcagattctgactacagccaactggggcagtcagcccgggcaacaggaacaaggaggcatggccactgtactgagggttccttgcgctccagctcagggtttagagcacgactctgcagttagccagcctgggttgaacctgttattagttgtgtaacatgcacactttttattttattttattttatttttgagacagggtttctctctgttacccaggctggggtgcaatagtgcaatcagggctcactgcagcctccaactcttgggctcaagcgatcctgcctcatcctctcaaatacctgggactacaagcaagcaccaccatgcctagctaattttcttatttttttgtagagatgaggtctcaatatgttgcccaggctgctctcaaactcctggactcaagtgatcctcttgcctccgcctcacaaagatttgggattacaggcatgagccactgcacctggcctaacctggacactttatttatttatttttattatttttatttttttgtcacagtcttgcttctttttctttctttcttttttgagacagagtctcactctgttgcccaggctggagtgcagcggcctgatctcagctcactgcaacctctgcctcccaggttcaagcgattctcatgcctcagcctcctgagtagctggaattacaggcgtatgccaccacgccaggctaacttttttttgtatgtgtatttttagtagagatggagtttcaccatgttgaccaagctggcctcgaactcctggcttcaagtgatctccctgctttggcctcccaatgtgctgagattacaggcgtgagccactgtgctcagccctgatatagtctttgattataaaaaagaacaaagtactgacacatgctacaatatgagtgaatcctgcaaacactacccggaggggaagaagccacacacagaatatcacataggattctattgatatgaaatgcacagctgggcgcggtggctcacgcctgtaatcccagcactttgggaagccaaggcgggcggatcacgagatcaggagatcgagaccatcctggctaacatagtgaaaccctgtctctactaaaaatacaaaaaattagccgggtatggtggtggacacctatagtcccagctactcgggaggctgaggcaggagaatggcgtgaacccttgaggcagagcttgcagtgaaccaagatcgcaccactgcactccagcctgggcgacagtgcaagactcagtctcaaaaaaaaaaaaaaaaaaaaaaagaaatgcacagaatacaaaaatctgtagaaacagaaagtagaactgtggttgcctggggctgcctgagaggaagggatgagagggttttggaggatgacagctataagatatgggctccttttgtgggtaatgaaaatgttctaaaattgattgtgctgatggttgcgtaactctgtaactatactaaagaccattgaattgcacactttaaatgtgtaaattgtatggtatgtaaatttatctcaatagaactgttaccaaaaaaaaaaaaaaaaaagcctttcctcaaggagtttttttggaaggattggtgttttaagaaactttggaaaacaaagatgtaaaccaggccaactgggtccccctggtggcctggaggacaaggttctccagtggaccctgaagaactacccaccaacagtgaagccaaaggggtttttttgtcaagagtgccatagtcagggtaagtgtcctgcacgatgacattccctcctgacaggcacagagccagggctgggtaagtgtgtagcaaatcttcacccccatttatctgtgcatgtggccgacaacgacctgatggccgtgctgagcacctgggcagcgaggacaggcctttcatgtaccagcctcacctgggaaccagcaggcagtactgtgcccgtcctgtaggtaccctctgtcctggccaagggagccagtcaagaatagcgcaggctgggaaaccagttgggaaaccagatgggaaactctggagcttggggaagagcagacatgggttttgttcccaattctcctccttttctgcgtgaccttgggtgcagtgttcagtttttctgggccttagctttccccatgtggaaaagaagtaaatcctgctcttctccctcaacaaggctgctggagaaatccaaactgaagaccggcaaggttagaagggactccgatggttgaatctgttctcactctcctcaggtgatctgagggatgctgtccagtgccagggagtgtactacctcccatttctttctttctttcttttttgaaagtcatcttagtatttcttttcttttccttccttccttcctttctttctttctctttcttcctttctttcttttctttctttcttttgagatggagtctcactctgctgcccaagtgggagcaaagtggcacaatctcagctcactgtaaactctacctcctgggttcaagcgattctccctcttcagcctcccgagtagctgggactacaggcatgtgctgtcacgcctggctaatttttgtatttttagtagggatggggtttcaccatgttggccaggttggtctcgaactcctgacctcaagtgatccactggcctcggccccccaaagtgctggtattacaggtatgagtcaccatgcctggccactacctcccattttattgctagacaatgtggcactcaggaagcccttccttctattgtactgatttctgatttctgtgagctcttcccatagccttgattctccccttgggcctcatgaaatgggactacccccgcgccatgatgccccacagggcccacttcactcagccctctgactctcctgatgccaggaggccactgcactcagagcaagattgcacattcctgccttgttcagagtcaatgtcctgtggcattccagcctccagcctcctggcctgtccctcatctccctgacctgggacatctgcccggcctcccatcacctctcaggcctgctgctctatgatgccccaggctgctccacttcccagttgtgacttccacttgctgctcaaatgaacacttatcctgacttccgtaaggaactcagcctccaccaggccccaggaggccccttcccaccccactttgctgacattcctttggggtagtcctagcctctgcagagtggcaccctggacagcccaccagctccttagagacactgactgcacccattcctctctgtgtccccatctaatggtgaaccccaagtccatccacatcctccatgagtgcagcacctcaagctgcttataggcccaagcacagccttaccagggcagcctgactatagcagggccaggcaggatagaggagcattgcctctctctccttctaggagccacctttttattaacgcccacctgtctaagatcatggagagagaaatcacttgtcatcttggactgccattcttcttaggtggcctggtatacccatgtggcactattgtctctcttgttccatgccctgatgggtatgaagtcctatcagacaaaatctccaagactgatctctccctcactgtgtggcttcatctggtcccttcctgtgtttcccagaagttgggttctgccactgttgggcctccttagatctccagcctggcatccaggccatcctcactcccatcctgccttggcctttcctgatatgtcaagggtctcagcccaccatggtccccatctggctagaagcactcacatcccgcacatggctgctgtctccgtgagtcactgcacaatgacatgttcattaggacagcgggagctcattttgccaactctggaaccacgggagccggctaagtttagaacaagccttgagcgtgaggatgctgtgtttcttttccttctggcaagacacgagactcgagctattcttttcatcttcattctcccagacaagccctaagcttcacttactgctagatctgcctacatccaacataagctcctctgtaattaagaggagaaactcccccaaggttgaaaagcattgggttatgggaatgttttaaggaatataatgaagagtctgaacatgggatgatttaaagacttaatgcaggtgttcttaaccctgtttctgtggatgggtttcatggagtgcagaaacccccttagttcttgtatgactgtgcatttccctggggaaaagggactttatatatatatatatataagtccatagggtgtgaaattgtgggagggggagtctacctgtctagtgtccaacagtggtcaggaaattagtccctgtgctaacacctctgccttccattgcatagtctgaccatcaatgtgatggctgctctgtcttaagggccatttgggatcaaaaagcccagaactcaaatttgagattgaccatttgtagtgtgaccttgggaaggtcatcaaaccattcagaacttaattttcccaattaaattttttttaatttccagattaataaatctgtgcctctacacccaaagaagagtttgggaaagaaaagaactaacacttattgactatctaatgtatatcaagccttctgtttgtaatcattttccttttcaaactttacatgccccaagagtctccaagagttgctatgagagctcactgagaacaaatatttaacaactgtctaggtaccgaggatacagcagtgagcaaaacagatgaagtccttgtctttgtggagctgacaatctaacagggcagacagacaataagcaaataaatatgtacaatgtcagggcaaagggtgggataaggggaatgaagaaaagtggagaggaatgagagaaggcaggatatgtatgctattctgtgacagagtgacatttgagcagcaaactgaagatgttaaggagcaagccagcctctggtaaaagataattccaggaagaaaactgcaagcacaagttctgagatgggaatgtgtctggcttatgatgagtggtcagtggggctggggcagaggaacctaggtgagagaatgataggaattcaggacaaaataagacccaattaagggctttggatgctaggaccacggatgtaaacatgtattgcaagtattaagcactatgcatgatagatgcatctctccattcatctgtccttcaggacttgagagtcttaatttttttaaagcatatacattttaatttttattttttaaaaatagaaacagagtcttgctttgttgcccaggctggtctcaaacccctgggctcaacggatcctcctgccttggcctccaaaagggctgggattacaggtatgagccaccacatccagcctattatactttataaagatttatattatatacagtaaaatgctatggatttttaacacatccaatataaccaccagctaaattgaagtatagaacatttccattgccccagaaatttccctggtgcccttttccagtggctatcccaatcccactccccagaggcaaccattgttctgatttctgtcactggagttaatttatttccctgttcttgaactttgtataaatggaatcatacagtatatattcttgcataaggtttttttcatttgtttactatatattgttcctcagtttttaaaatttttaagtttgtgggtacatagtaggtatatatatttatggggtacatgagatattttgacacaggtataccatgcaaatagtcacatcagggtaactgtggtatccatcacctcaagcatttatcctttatttgtattagaaacaatccaattattcttttttattttaaaatgtataataaattattgttgattgtagtgaattctagaccttattcattctattaaattatatttttgtactcattaaccatcttcacttccccgccaccccactaccctttccagcctttgataaccttcattctaatctctagctccatgagtttaattgttttaatttttagctcccacaaatgagtaagaacagacaaagtttgtctttctgtgcctggcttatttaacttaacataatgacctccagttccattcatatggttgcaaatgataggatctcattcttttttctgactgcataatactcttttgtgtatatgttccacattttctttatctgttcatctgttgatggacacttaggttgcttccaaatcttggatattatgaatagtgctgcaataaacatgggagtgcagatatgtcttcaatatactgatttcctttcttttggatatatgccttgcagtgggattgctggatcatatggtagttccatttttggttttttagggacccccaaactattctccatagtgtttgtactaatttactttcccaccaacagtgtaagagggttccattttctccacagcctcaccaacatttgttattgcttgatttttggatataagccattttaactggggtgagataatatctcattgtggttttgatttgcatttcagtgattattaatgatgtttagcaccttttcatatatctgtttgccatttgtatgtctttttttgagaaatgtctattcagaccttttgcccattttttaatcagattattggattttttttcctgtagagatcctggttattaatcccgtgataaatggataatttgcagatattttctctgattctgtgggttgtctcaactttgttgattctatcctttgctgcagaaaactttttaacttgacatgatcccattttagctttggttacctgtgtttgtgggcaagaaatctttgccgagttcaatgtcgtggaaagtttccccaatgttttcttttagtagtttcatagtctgagatgttagagttaagtctttaatccatttttatttgatttttttaatatggcaagagataggggtctagtttcattcttctgcctatggatatccacttttcccagaatcatttattgaagagactgtcttttcccaatgtatgttcttggcaactttgtcaaaaatgggttcactataggtgtatggatttgtcttcaggttctctattctgttccactggtctatgtatctgttttcatgccagtactatgctctttgggttactatagctctgtaatataatttgaggccaggtagcatgattcatccagttttgttctttttgctcagggtagctttgggtattcagggtcttttatagttccatataaattttaggattgttttttctatttctgtgaaaaatgtcattggtattttggtagggattgcattcaatccgtagatttctttgggcagtatagacagtttaaagatattgattcttccaatccatgaatatctttccatttttttgtggcctcttcaatttcttgcatcaacggtttcaagttttcattgtagcgatctttcacttctttggttaagtttattcctaggtattttatttgtagctattataattggaatcactttcttgatttctttttcagattgttttttgttggcatctagaaatgctactgactttcgtatgttgcatatgatacatgacttttgtatcctgcaactttactgaatttgtatttgtttttcagttctaatcgtgtttttgtggagtcttttaggtttttccaaatatcatctgcaaacaagggtattcgtcaatcttcctttccaattgggatgccctttatttctttctcttgtctgattgctctagctaggactggctatatcgaataatagtggtgaaattgggcatctttgtcgtgttcccgatctttcaggaaaggttttcagattttccccatttagtgtgataccagcagtagtttaatcgtatatggcttttattatgttggggtatgttccttctataccaagttttttgagagtttttttcgggttctcatgaaggtgctttcttgtgtggatagttgttcaaatttggtgttcctatggggaagatgattggtggaactctctatttggtcatcttgctccacctcctcttgcataagatttctttcacttagcatggaatgctttggagagtcatccatgtcatcacatttagctgtaattcctttcttttgtcatagagcagtattccatctacccaacgctcgaaattgtcagtcttccttttagccatgtgcaaggatatgaagtgcaactcactgtggttctaatctgcttttccccgatgactaaagatgtcaagcacattttcatctgtttattggccatttatgtatcttcttttgagaaatgtctggttaagtcctttgcccattttgaatgtggattgtctgtcttcttgttatggatttgtgggagttctctatatgtcctggatatgagtcctctgtcagatataccgctgtgaatattttctctcaatctcccagtaaaaattgatgggtctttttgctcactaattatgtcttttgaaggttttattttcaatgatgacaaatttatcctttctttttaatgggtaatgctttagtgtcctgtctaagaaaattattggttaccccaaagtcaagaagttattctctgttttcttctagaagccgtatgtttttacttttacatgtagatccgtgattcatcttgaattaatttttatatataggccaggtatggtggcttatgtctgtaatctcagcactttaggaggccgaggcaggaggatgacttgaggccagaagtttgagaccagcctgggcaacatagcaagaccctgtctctacaaaagtttttaaaaagactagctgggcatggtgcactcttgtagtctcaggtacttgggagactgaggattgcttgagcccaggagttctaggctataattagctatgactgtgccactgcactataggctgggggacagagtaagacccagtctcttaaaaaaatgtgtatgatgtaaggtggagtgaaggttcatttttttccccatacagacatccatttgtagaacatggaaatctttttggctgaatctcacacataaattctcctggtaaattatgcctgttttaagagtctgtctcccagaactgattttccagctgcttctagtagcctctgaataggcttagaagatgaaataataatggtgaaaaaacaaacacctagactgagtaaagaaacaacagcagaaacagcaatggcccatttgtgatattgtctagcctttagcctccctcattgcctaggctgcatttggcttcccacggccagagccaaggagggcagaggggaaggggaagcaaaacatggagcaggatgaggcaaaaatagaagcaagtgttgagaaagtccccacagggctgagccaagctggcctggaagctggctggttctttggggccctactataatttgaatgcttgtgtcccctccaaaattcatgttaaaacttaaattcccaatgcaacagtaataagaggtgaggcctttaggaggtgattaggccattgagggctccatcatcatggatgggattagtgtcctttaaaagggctggagggaactagttgggatccttttgcccttccgcatccatcatgtgtgggcacaacaagaaggccctcaccagacaccaaatgttggtgccttgatgttggtatttccagcctccaaaacagtgaaaaaataaattttgttatttataacttacccagtctcaggtattttgttacagcagcacagagtaagacaggtcctcagcaggaatctagctgtgcagcttctctgtgtctctctcctggtatttgtggagactgggaatattaagtctcagaggcgcaagtcagataagagggctgtgggccaaactctcctccaacaaggccagaatgccctctgcagcacacaaccagtgatccagaagcttgctcatggtatcttattcattcaatttgccctaccatcttagaagaaagatacttattacttcaattttatagatgaggaaactgaagatccaagagattgaatatgcttcctagcaccataagttacatgtggagaattaggattctcttttccactttcctctccactgcctctcatttcccctgtgatccagcccttccaaaccacgtggtgctgaaccagtcagaccactgtataaccacaggctttccctcttgagaaacttgcaagcaagcaaaaaagagatgcatgtgggccacttccttttccacattttcccaaaatagcctaaaattcctgtgaaacagagagcatttcaggcccaaggcaaggatttgcttatattgcatgcaatctagtacaaagaatttcaacaaagtgaaaacatttggacattcctttggactttattgattcaatcaactcacaaaaggatggtacaaaatggtataaaaaacagccaagctttttgcacagtgccatacatttgtctatgtggcacctcctcctgcaaagctggctttgccaggtgctactctcaagtattctcaactgcctggcaaagttagcttctcctctttgatgcctctttggctcctgaggtagattgagcatccctgtatatccctccacagccttttgtccaaacctcaatttccaacatctcctggactgtattgtttgccttcatgtccatataccctgttagactgcgagacctcaaggccaggacctgttatcttttacttcagtatcccaagtacctgtcacaatatctctctaacttccctcaataaatgttaagtattgaaaagatggaggctggacggggtggctcatgcctgtaatcccagcactttgggaggccaaggcggaatacctgaggtcaggagtttgagaccagcctgaccaacgtggagaaaccccatttctattaaaaatacaaaattaacttggtgtggtggcacatgctacccaggaggctgaggcaggagaattgcttgaatccgggaagcggaagttgtggtgagccaagactgagatcgcaccattgcacttcagcctgagcaacgagaacaaaactccatctcaaaaaaaaaaaaaaaaaaagaaaagaaaggatgggccaaagaaggtgccagaaattgaagagaattgctgagtcagttcaggagaacttctgaaggcaggagctcaagtaacagtctagatacgtgctcctttctagctgcgtggtactcagtttcctcatctgaaaaaaggggatgaaattagcaactactttgtagagacggtgtaaggattgaacgagttagcacaggaaaagcctttagagctgtgcctggcatgtttcacactcagtgaattttaaaatcatcataatcattgtcatgatcatgattatagtgatagtatcttgctttcatttcgggaccagaggcgctaggctccagcccaagtggctgatcacgaagagtacacatccaaggctccttgccttctttataacctagagagacacctgccctggatgagggaaaggtgacagtggcatgaggaccaggaacctaatgccaggaggtggctcagacaagtcaggtggaccaagatggtctcacttgaatgggggaaaatggaagcctatggttaggaagcccagaagcccaccagctgtgtgcgaatgtcctcagagatggtcagccctctagccacgttcctcaacctttcttccatatggggactcatcagtgccttttagttttttagtaccatagataacattggaaccaacgtctttgaatatagagcttcccctcctctgtattggggttattttcttgaaatagattaccaggaagtggaattactcagtcaaaggttatgtgcttttaaatgaccattttcccaaagttaataatcatagtctaatctaagtggagtacacagctgttccttttttggtctgtcctgaattccctgtgtcaggaaacggctgtttttcagtccatctgatcctggtaagctgtcactcccactgcccaccctcaacctgggttccctgtctcaggagtgggcacacatctaaatggccattcagaagacctcagacccttgggcaaagcaactggcctagggtaaatatgtgaccccagcagggccaatcagaatttttgaagggctatatttaaaaattttttaaaacatctttaggtttgtagaaaattgcaagtacagtacaaaaaacctttttgctaaactatgtgagaatacatttgctgatatgatgcccatcgcctccaaatatactttagtgtgtgtttcctaaaaacagggactttctactacatcaactattaaaatcaggaaattcatgctgatacattactataattaaatcctcagatttcattcaggtttcaccaactgttccaaaatattcttttttctttttctttttttcagttgcaccatcacagcttactgcagcctcgacctcctgggctcaagtgatcctcctgccttggcctcacaaagtgctgggattacaggtgtgagcccacgcccagcccgagaacattttttatagcaaagggatccattcagaatcacacactgcatttacttggcaagactcttactctccttcagtctgaaaaagttccttaatcttttcttaactatcatgaccttggtcctataaagatgaccaaccagttactgtgtagaatgaacctcagcctgagtttgtctgttgtttccttttgatcagatttagatgaggcatctttggcatgaacatcacagaagtgcagctgtattcttttcattgcatcctatcaggtggcgccattttggattgccccattgctggtgatgctcactttgttactggattaaggcaatgttggccagcctcctccactgtgaagttattaataaaatctgggggcagttactttgagacaatgtaaatattccacttttcctttttttttttgaaacagggtctagctctgtcactcaggctggagtgcagtgggacaatcacggctcatttcagcctctgcctcctgggctcaaatgatcctcccacctcagcctcttaagtatctgggactacaggcacttgccactatgctcggctaatttttgtaatttttgtggagatggggttcaccatgttgcccgggctggtcttgaattcctgggctcaagtgatccacccaccttagcctcccaagtgctgggattacaggcatgagccactgtgcctgaccccattactccttaatcatttcatttatttgtttgcttatttatttatattagtatgaactcattgcttcctattttatccaagggtttataatctattactctcattatttatcttgatgctcaagttgtcccagatttggctcgtgggagcttcttcaagccagcttctgtgtcctcctttaagtgcttccttgctttctggtttaataagatatctcgggttcatatggtactttcccaggctcggccttggaattagacatttctctaaggcattctaattccttttagcatagagttgtgtttagaagtcaagatccatgccctaggcaaactcactgccaggtggcaaaaaataaaaataaaaataaaaaaataaaaaaggatctagccccccagtgtgcttattgtgaatggggaacacactctatctatgtctccatattaaacaccacaagtttacatccttttggaagttttatcatggactctgaaacagagagtttctctctagaattataacttctaagatcatatagacctggagatactgagagacattttagcactgctgaataagatcctgttggggaatgaagtcaagcagaggcaagtggatctgagaggtggacaaacctagggtcccagaatactactagatctagtcatgcctgagtcccttgaatttcttggctacatgagccaatgcatttcttttttgtttaaagctaatataaactaggtctttcacaattgacggagtcctgatcaatatactaaatagcttacaagtgactagtttgcctttctaccatggaatgctggctctagccttcaggtttgttcccttccagtactggcggcagagggagtttacctctgtctggttccccgtctgtcaatgcttgagactgtgaccacgccagagtactgggctccctagagtcacttggttccacggggacctcgcccactttgctgctagtctttcatgaaatggtgctgcaccaccttagaggccttggagaagaaggtgtgggggaagaccatcagctcctccatgggtctgccctaggtgtggacgctggctgccttttaacaccccaaagcaaagacagggctgcagtggtcaacccagcattactgaaggctcaaccatagcaggagggaactgagaggctggagaaacagacttaaaactggaagccaggttgggtgcggtaactcctacctataatcccagcactttgagaagtcaaggctagagaatcacttgaggccaggggttggagaccagcctgggcaacatagcaagaccctgtctctacaaaaaaaatttttaaaaatttgctgggtgtgttggcctgaagttctagctacttgggaggctgagacaggtggaccacttgagcccagaagttcgaggctgcagtgaactatgatcatgccactgcaccctccaacactgtctgaaaaaagaaacaaagaaacaaagctctacctctcccatgataatctaagagaatccagatgtctacaaccacacaggaaccaaagcctatgggtttccttctgcagtgaccccaggggactcggcagtccccaaccagccccgaaggcacccatcaacaacagaaaatgaagacaaacctcagcagccttcctgcaacaccagcctgatctcctggggggcctcctgggcagaaaacagccccctaacacacacacacacgcacacacacacacgtacatgtcactagtaccacccccacaccacatccacacactcacacatgcgcacacacacacacacttttctcccaaggacagaccattttctttttctttttttctttttaaaaaactcccacgacagcttaaaaagtattattattattattattattattattattaatttatttatttaatttttttttgaggcagggcttccctctgtcgcccaggctggagtgcagtggtataatcttggctcactgcagccttgacctcctgacttcaatcaattctcctgcctcagcctcccgagtagctaggaccacaggtgagtgctatcgcatctggctaattttgttcacttttgcagagagcgagtctcactatgttgtccaggctggtctcaaactcctgggctccagagattctcccaactcagcctcccaatgtgctgggattacaggcgtgagccaccgtgcctggcccagacaattttcaaggcagtgcagtccatatctctataccgtcgggggaagaaaaatgttgggcctagtgcggtggctcatacttgtaatcccagcactttgggaggccaaggtgacctgattgcttgagctcagaagtttgagaccagcctgtgcaacgtggcaaaaccccatctctacaaaaagttgctgaagtccaggaagttgaggctgctgtgagctgattgtgccactacactctagcctgggtgacagagggacaccctattacaaaaaaaaaaaatcagaaaaagaaaataaaaataaaaaaaattgttcccaaagatttgggaacaccgtgcattcgaggtcgcctttcctgctgggcctggtccactccggaataaggtctggtctaacccacagtcagccaaagcccacagaagtgtttctcccaaaacaagaggggcctgtgcccagaggtttatttaagacttttcctctccctcacacagaaaacagggaaacgataaactgagtatatttttcccccaagaaaaaaagtttccaaagtctcagataaatgttttctttgtctctttttctttctctttttcctttttttgagacagggtctcactctgtcacccaggctgctggagtgcagtggcccaatcacaccgctcactgcagctttgacctcctgggctcaagcaatcctcccacctcagcctctggagtagctgaaaccacaggcacgtgccatcacacccagctaatttttgtactttttgtagagacgtgattttaccatgttgcccaggctggtctcaaactcctgagtccagcgaaccgcctgccttggcttttcacagtgttgggattataggtgtgagacacagtgcctggctaataaatgttttccacaaggctcaggctcagggtcccccatccccttcccccgctttccactctagggacctctgcaagtagaaagttgtccccaccctgccttacttgaggggaaggtgagggagtggaagaggcctcccacctccccagagcataaggttggagcatctctattgttgtccctgctccacacactgaagactgtgccgggtgctgatgaaagactatgctgatttcccaatgtcaatggaggctctgaacaaagaaacccagggtcacacagtcaatgacaggctgagctggtattccaacccaggccgggctgacctcagagcgatagctcttagcggtccccatcaattggtctccacagatcctgcaaagtcatccagtccaccagcccacagcttccttactggtgcctccaaggaagtttcccttatctatcctaagtctctcttgctatccctcttgccttgtttcctttgccttgtgcagaaacaacccctcttctgacagtgtcaggccctcctgaccacaactatggccatctctcagcttccctgtcctcgcacaagcaagatctcccaccctcaaggccaagggtttagataagaccttcattccaagccattcctgatatcactggtgttgcatcagttacacatccctcatcatcgaatgctttcagtcttattttcgtaagtgatataattcaacctgttttttccatctcctctgccccagatgcccagaggaggctcctaccatgggtgtttcttgctaaggtgttggcttcagtcagtccaggccaagggcaaaatgtgtaagttcttgggcctgaaagatatgcattgacacatggacacagggaggggaacatcacatactggggcctgtcgggggatggggggcaagggaagggatagcattaggacaaatacctaatgcatgcggggcttaaaacctagatgacgggttgatgggtgcagcaaaccaccatggcacatgtctacctatgtaataaacctacatgttgtgcacatgtatcccagaacttaaagtataataaattaaaaaaaaaaagatgtgcattgaattctgccttagccacttaccaactctgtggctttgtggggggtctctggtcctctctgaacatcagtttccttgtctctggctctcttctcatcggactcttgtgaggattatttgggatgtttctttcagccccaaaatatttccttttggagagagcgattcattggatgtcaagcattgtaccctgttttcagtttagtggcttataatgaagcagcaaggcacctagtgtgtgttcccaacacacattaggtgctcagtaaatgtgtggcccctcctccctctccagaccaggaaagatctctttatatttatttcactggaaattttcccatttcactgtggtttcccaggaacaagcagtccctggtgtattttgcaaattagtacatccctctgcagatggcaggcctgagatcagagaagtacaccatgggtacaaagtcacatggcaggctggtaggtggttgacaagatggcccttgtcaagtcaatagactctgcttcccctcctgtattaatccattcttatgctgctaataaagaaatacccaagactgtgtaacttacaaaggaaagaggtttaattgactcacagttcaggatggctgggggaagcctcaggaaacttaaaatcatggcagaaggggaagcaaacacatccttcttcacatgatggcagcgagaagtgccgagcaaaagggggaaaagccctttataaaaccgtcagatctcgtgagagctcacccactatcacgagaactcactatcacgagcacccccatgattcagttgcctcccaccaggtcccttccatgacatatggggattatgggaactacaattcaagctgagatttgggtcggggcacagacatactgacctccaaatcctccaaaggagatcacctccccttcctgtcccctttggtgtcacttgagcagttctaggtcttgctgagctccaagtctaccctctcatctcctccatccaggtgaacttacttttctccagcttatatctgctcaaggcaaaaagataacttattggccagacgcagtggctcatgcctgtaatcccagcactttcagagaccaagacaggcagatcatgtgaggccaggagtttgagaccagcttggccaacattgtgagaccttgtctctactaaaaatgcaaaaattatctgggcatggtggtgggcacctgtaatcccagttatttgggaggctgaggcaagagaatcacttgaacccaggaggtggagattccagtgagccgagatcacaccactgcactccagcctgggcaacagaatgagactgtctcaaaaaaaaaagaacttattaactcgtggacctgggaagtccaagcaagggcaattcagacatgattggatccagagctcaaacaaggtcttcagagtggtctccatcttatgtctccctttctccttccctctgtctgatggtttgagtccataactggccttctgcacatggcaagaaggatgtcccatggcagccccaattctgtttccaaattacttagcacctcagagaaaaagaccaatagattcagcacaaaatccaaaatccagagggcctctgattggccctgtctggtcttttttttttttttttttttttttttgacacagattctctttctgtcacccatgctggaatgcaatggtgcaaccttggctcactgcaacctcggctcactgcaacctcagctcactgcaacctccacctcccagggtcaaacgattctcttacctcagcctcctgagctgctgggattacaggcatgtgtcaccatgcctagctaattttgtatttttagtagagacagggtttcaccatattggccaggctggtctcaaactcctgacctcaggtgatctgctcgccttggcctcccaaagtgctgggattacaggcgtgagccaccacacctagctggggataggtgttctaacaggtggattaggcctgttgccacggctcacacctgtaatctcagtattttgggaggccaagctgggaggatcacttgaggccttggggttcaagaccagcctcggcaacatagtaagacccccatctctacaaagaaatttttaaaattagccaggcctggtggcacgtgcctggagtcctagctactcaggaggctgaagcaagaggattgcttgagcccaggagtttgaggctgtagtgagccaagatcgcaccactgtccttcagcctgggtgacaaaggaagactctgtgtctaaaaagaaatttttttaattaaaaaaattaagaacagaggcatctatctacctttggaatctgaggagaaaaaaggacagggtcagctccccagaaccacatagaatgagttacccctcagagagagggatgtgctgccagaaatggggatggctgtggcacaggtaaaaacagcaggtgttgcccagcactgccctgacttccacagcctcaatactacaccaatagctgttagcaagacctctgcctcttgttcaaagaagctacagaaaaagaacatgattgttgaggtcaagtggagctatgacaagctgtagttctgccacttgttaagctgtatgacactaaccaaattctttatcctgttgaagcccaatttcctcacctgtggaataaggataatgattcctacttcacagacttactgtgaagatgaaacaagccaaccaccaagcccaggactcagtgaggaggagagaattcatctacctctgatctctttgcctttggtccctgacctccagcttggcttccgggtcccagctctgaaactgggaccgggtctctctgtacttggaggcccacctgcgtggagctcactctgacgcagtggcaggaggtcttaccaggagatggagcacatggtgttttgtttatttgtttttccatcttgataaaaaatgtgcagtttttacactgtcacagaacaaacagaaccttgacatatgggcctctatttatgtgcatgatttaattaatcatgtttcatgttccatcatctttctattatgaagaatgatatttttctctgggacttccttccttccttccttctttcctccctccctcccttcttccttcctttcctctatccctccttcttcctttctctctctctctgtctctccctacaattattccctagtactcactctgtgccaagctctgggctggtctggtggtgaacaagatggacacagctctgcccccacaggggttacagtctagcagaggattcagatgttaaatgacagtcatttaactacaattgtagtgaatggtctaaaggagaaacacacagggctaggagaaagaaatttggcctgatctggggtatccagaagagcttcctggaggaagtggcttttgagctaaacttgggaataggtggaggtctccactggttgtggagttcaatgaggtgggtgttcctgcagcaaaaacagcgtaatggagaggccagagggaagggacaccatgccttctagaacaagacagagggccagcatatgtggagtaaacaaggacttgggagagctgctcaaggccaggcttgggggcaggcaggggccagatcatgtagggtctaaaggccacactaaggctattggtcttaattccagagcaatgggccttacacagttccagggctgcactccgactggaagtggtggaagtgggagctctcaccaggaggtggcacttagaggttttgcttataatttccaactggataaagcgctgtctatttcttgcagtcacagagcagagagtgtggcaagctcatgaactgggtgctgggtgcactgtgcttttgtctactttccctggactccacctctggctagctgatctatagcccctgctggtccctcatcctactcagctgaattccctgacgtgccccacctgcccagctccagcctgctgttgtctgtctcccccacctccaccccagatccttggacctcactaagaggtttggagatgggactcctctcccagaagctctgcactgctttgttggggcaggagtcaagttcctcttacatgccctctgtgtcccctcccttcaccccctagaacctcgaggaactgatgttcttaagcctccttttgttccagaaaactcctcctgtgagaatcatcaatctgtgagtcagaggactctcaaagtctatctagtccagctgtttctggaaatcctccaaaggcattcctgccaaggggccacccagcctcggaatgcctccactccagggagcttgctgcctgctctacttgtagcttgggcttggatccaaagcttttgaacaggagaggggacagtgcccctccacgtgtctgtctagaagttattttgggtagctcacctaaatattgtctttgccatctaagctcatttttttgatgtccttccaagatacaacagggccagggtcagctgcttagcttcccaaagtcaaagccacctccttcaccctctgcaagaggccttgcctttcactgcacaaatgggcagttcctcctcccagagaagcctggtcccttctctttctccacggactcctgtacccaggaaacaggaaacacaggcagatgatgtgggagaaggagtgactcagaagttgcgaggaccatcaggagctctctaaggacagcagggagtctactcctgggacccgcagtagggcacttgggggtctggggactgggcttgaggcttgcctgcttgcctggagtgacagaagtgccagcctcttggctccacatcatttttgcctctgggtcccctgcaccttccatggaggcgctctgccaatgacaaataatttgggaaactctcagagaactcttgctctctctcaggctcagtgaattgttctctttgcaggcagcagctcctgaagaaaacagctgtcatggaagcttccatccatttcattgcatgttcaccaagagagctcattacatgccaggcctgttccaggcacttggcatacaagatgagcacctgccctcaaggtgctcacagtttaggggggaatccaggtgggagatgatcaaacagatgtccatggtgtcctgtgataagtgctgcaagggtgaaaggtttctgagaggccagaggaggaggctacctcagcctagggaagcagggaaggctccctggaagatgtgtcccttaagctgagttctagaagatcagtaggaattaaccaaactgcgtcagtaggaaggaagagatggtggaaaattggcttgggccagagagaacctggtgcatttggggaattgcaaggagttgtgggagactccaggtaacaaaagcagctcaggccggggaaagaaaagccttccttatggaggcaccagaccttatttctgggccttccctttccccccgtgatgtttctccgcagccctaggctgcgctggctgcccatgcttcctgatgttactatgtccaggctggaggattcagccattacccacaattcagcacttaggctggagaggagagaagagttattaggtgccacctcgcagtggagtccgggaccactgactcctagcccatggatctctaaggaaacttataagtgatgtttaaagatccgttctttgaaaagcaaaatacagacagatatgcattacaaagaatctgagttgatgttgcctgaagatatcaacaatgatcttagccatggaagtattgtttttttttttgagacgaagtctcactctgttccccaggctggagtgcagtggtgcaatcttggctcactgcaacctccgtctccagggctcaagcaattctcctgcctcagcatcccaagtagctgggattacaagcatgcaccaccaatcctggctaatttgtttttgtttttggaagcgtaatctcagctcactgcaacttcacctcctgggttcaaacaattctcgtgcttcagcctccagagtacaggtgagtgacaccactcctggcttttttttttttttttgtatttttagtagtgacggggtttcaccattttggccaggctggtttcgaactcctggcctcaagtgatctgcctgcctaagcctccgaagtgctgggattacaagcatgagccactgtgtctggcctgtgttttttgtttgtttttttggtagacacagggtttcaccatgttagccaggctggtctcgaactcctgacctcaagcaatctgccctcctcagcctcctaaagtgctgggattacaggcgtgagccactgcgcctggccttgtgtccttgttttcaactccacctaggagtggaattgggacaggtaattctgtgtgtaattttttttctttttcagacaggatcttgttctgtctctgcagtggtgcaatcatagctcactgcagcctcaacttcctgggctcaggcgatctgcctgcctgagcctcccaagtttctagcaatagagctgcatgccaccatgccagctactcgggagactgaggcaggagaattgctcgaacctgggaggcagaggttgcagtgagcggagactgcaccactgcactccagtctgggcaaatacttagcacaccaatgttcacagcagcattactcaccacaagaaaaagggggaaagaaacccactgtccatcaaaagttcaatggctaaacaatgtgtgcaaaatacataaaacaaattattattcagtcatagaaaggactgaagcgctgatacttgcttcaacatggatgaaacgaaaacatcatgctacgtgaaataaaggcagccacaaaggacaaacatcatatgatcccacttacatgaggtatctagaatgggcaaattcatagggacaaagtaaaatagaggttactagcagctggggagaggggaaatgaagactttttgtttaatggctatagtttgtttcatgtgaggtgaagaagaagttttcaaataaatagtggtgatggcaaattctgccagatacctgtggtaatcccctttcctaaaacaaaaccaaattaaaaaaaatttttttaactaggaacaatgatttctaaaggaaaataagctaaaagagttctatattttctaaaatatgtgacaaaatgtatgtaacaattagcaggtatacttcaataattttaaacactctcaggaatgtttgactttctttcgtttttttccttagacatttcatattcaaaatataagtaaaaatcccacagaaattaactggggaggctctaaaaatcaagaaaatgatcacagactaaaattaaacaagcaagtggttccaaggagtggcacgagagtttattaattacgaaataaaatttctatgtaaaacattgagacagcactgtgaaatgtatggccactacggggagggaaaggggataggtcccacaaaagcaaaattatataaataagtaaagcaaaagctaatgcatttttataatagcctgaccatctttttattccaacattaactatccttctaacattaaacaattattcttaaataaaagttgaaaacctacacagaaataagtcatgattctaaaaaggtcaacatttaatctcacattttcccttctagtataaaacctacattttataatagaaaagtttggactctggcagggcacagtggctcatacctgtaatccagctttgggaggctgaaacgggtggattatctgaggtcaggagttcgagaccagcccagccaacatggtgaaatcccatctctactaaaaatacaaaaattagcctgacgtggtggcacacaactgtaatcccagctacttgagaggctgaggcatgagaattggtgaacctgggagacggaggtcacagtaagctgacattgcgcaactgcactccagcctgggcaatagagtaagactctgccaaaaacaaacaaacaaacaaacaaacaaaatcaggccaagcgtggtggctcatgcctgtaattccagcattttgggaggctgaggagggcagatcacgaggtcaggagttcgagaccagcctcaccaatatggtgaaatcctgtctttactaaaaatacaaaaattagccgggcgtgtatagacccagctactcaggaggttaaggaagaagaatcgcttaaacccaggaggtggaggtttcagtgagacaagattgcgccaccacactccagcctgggcgaaagagcaagactctgtcttaaacaaacaaacaaacaaacaaatagaaaaccttggactcgccagtgttagctgctggaatgaggtgtttgtccagtacatccagaatgttacaacagattaactttagctcagcctcaacctaaaaaatgaaaataaattttaaaaaatcggatcaagtctagaaattctgtaaattattacacattctatctacctctggttttcaataagagagcttagtattaaacagaattcatatcctccaaacttccttcttccctcttgacacaaaagccgagaaaagctgcctgtaggttataaaaagtatcttttcctttcttcattctattacatgctacacacacacacacacacacacacacacacagcctcacagtccagctagtcaattaccactgactaaaattgtacactggtgcttcttagttaatgctggtcaattatatgaattaacttcttttacaaggtaacaactattgtgtccatttacatgggcaaacagaagctaagacatttgctcaaagatcatcagcttaaaagaacttaatacgcagagctaggatttgaacccagaaaggtcgaaaggaacagaataaaattcaaacccaggcagtttgccttcagtactcttatcctaacaacgttcaacaggcaattcctttagtggtagagatccataactagttaagacaccaaaaacctatggaccaaagtaactattgccactcatctctatccatttataatgctgaaaatgtacaccacctctaaacgcacatacccagcttgcttcctgttttctattaactcatgacactactgttgaaactttctaggttcctctcattcccctggaacctcctttctactataaaacattctctcacatttcttccataatcacatccttatcttagctaagcaaaactattttctgaataaactacctccctgatggcttttcaaatagagcctgctctaggagaatgaagattcccatgttctcctagctcctcacatactcaatgactgctctcctgtcactccaaacccttcctcttcacaagctgatattctacattctgtttctcagtttctatcatcgatagatctctaggcccttcttccaaattcactgagtatctacagccaacctatccaatacctgagatcacaccaaggtatggtgtggccatgttccatgcaaaaatgttctttgccttctactccaagacattcacttgtccacacccgtaactgtgctgctccatactagaagtctgaaattgtaatactccactcttggcccatgacttcctttttcagttcctcttctctgtcatttctacttaggaactcatcaagacatccagactcttttttgttgttgttgttttctctttttttcttctaatgcatgtatctcatttaagatgtccagactcttgaacttctcacatctcctcccaatttatcagccgctctcttgcttcctgcttccctttcctagctagcccaaatctcacggtgaagcgcatgggcttttttcttcagcactttcaactttctcatttccttattcctctgggacacaaaacttgtctattgatcatccaaattctttgaacaaacaaacatatttcagggtaatggtagcatcagtcccagcttacaactttatttttagatacagagtctcacttttttgcccactactgggctcaagcgatcctgctgtctccatctccccaagtgctgggattgcaagccatgagtcaccatgccaggttccagctcacaactttctatgtgacctcacgtatgttacttaaacacttaaagccccgacttgtgcatttataggttgggataatacctaccccttccagtgccattttaaagatttcatataataccttgcacaaatacctatgataaaactatttccccactcagaacagtgcccagtagagctggcaagtcagtaactgtggttcccccaccttgccctctccctagcaagctcactttccacctgccctgtaattcccttccctgttctctttcatgtgtctacgtgcctgtctcttccactggaatcggtttctcaacagcagcgctattgacagcttgggcagaatcattctttgctgtgggaactgtcctgtgcatggtagaaaggttagcagcatctcagtctccacccactagatgccagtagcaccttccaagctgtgacaatcaaaaatatctcccgagattgccaaatgtcctctgaaggacaaaatcacctcaattgaaaaccgctgcactagagtaaaggctatcaaactttttggaacgagacctgcaataagaaacattttgtatatgtataaacacacacagtatgtgaaataacttccttaaatcattcttacccttacaatgtcccactctgatatgttctattctgtttaaaaaaacactgactagactgagcctccataagtatagtaatcatatctgtttcatctttgcactcacagtacctaggcaaattgtgtggcacacaagaggaacacaaatacttgttaaatcacaatgaatcactctatcgcctgcttgcccagatgtcttaacctggctttaggaagacagaacagataacagggatgaggccccggcttttcccaggaagatttggcaatacactctttatttagaagcaggggcactgacaggacctagggatgactgggggcttgtcacctaaacagcaagaagagcaaggagcctggttttatgccttcaagcctgggaggatgtggccagggctccacaaggccctggagttgggggagggggtgtgtgctggcaggagagcagatccaccctcctcttgaggaagcagccaccacccccaagaagcagcaattcggggcacacaggcagagtccccgcgtgctgtagagcagggccagcagatctgcactcaacctcagccccgagggagctgcaagacagatggagaccctgataggtttggctctgtgtccccactcaaatctcatctggaattgtaatccttctgtgtcaagggaggaacctggtgggaggggattggatctggggacagtttcccctgtgctgttccccgatagtgagtgaattctcaagagagctgatggttttaaagtgtggcacttcctcgttctccactcactccctcctgtcaccttgtgaagaaggctcctgcttccctttcaccttctgccatcattggaagttttctgaactgcgagtcaattaagcctctttcctttataaattacccagtctcaggtatttctttatagcagtgtgaaaacaaattaatacagaccccttccctgaaatgccttctccttaggccaccagctgccctgatgctcctcctctgccccctggtctttccttccccctaattaggcccaagtgatccacatggccaggcccagccccatcctactgcaggcctgtgtggctgctggagaggccgggctcctttcctcaccccgaggctgcctgatatgctctctggatcctggaggaaacttaccccctatccttatactggtgcaacttcttccaagacctcaaagttggacaacgtgagccagtcttttttcttgtctccacttgctagggctgtcactgggacagtcctggggcgggatggggtggaggggcaatggatgaatggatggatgaatggacagtagtccagggaggatgtccctgtctgtcctgaactgggcccttcctccaatgagaagccttcctgagtgagtttatacagtcaacccttggtatccatggaggattagttccagggtccccagggatgccaaaatccatggatgctcaagtctctgatataacatggccaagtattttttattttttattttttgagatggagtttcactcttgttgcccaggctggagtgcgatggcgcaatcttggctcactgtgacctccacctccggggttcaagcaattctcctgcctcagcttcctgagtagctgggattacaggtatgtgccaccatgtctggctaattttgtatttttagtagagatggggtttctccctattggtcaggctggtctctaactcctgacctcaggtgatctgcccgcctcgacctcccaaattgctgggattacaggtgtaagccaccgcacctggcctaacacagcctagtatttatatataacctgtgcacatcctcccatatacattagaccttctctagattacttatgatatacaatacaatgcagatgctatgtaaatggttgtgatactgtattatttagggaatgatgacaagaacaaagtctgcacatgttcagtagagtcatctaatctcttttccgaatattttccatccgctgttggctgaatccacagatgcagagctcccagatacgagggccaagtgtgctttgagagtaggatggtgaggtggctaatgagtacaagggagtaagtgtcagtcaggagggccctgcactggggcatctggatgccctatctcaggacttgaggctccaggtttggatggcacaggcaggctcagccaaagtcaaagccctccccttgaatgttctttttatcccaagctctttctggcccctggaatttggcatcccctaggatgccttgggtggaatgacgaataagccagattttagataacatgtctagaagagtgagcccctactgtgtgccgggcactttccccacaggattctctagctggaataaccaagggtcatggagagaaatacccagttaaaatatcagaaataaaaaaagacataccattagagatactaaaaagatcattaggtaatagtattcgcatttttattctgagatccaacagcagcaatcacttccctccacccctatgtgtatcccaggaccaccctgggcggggagggctgaggttagggagcacccatggatgctgtgatgctggctctgagcccagggggtgacagtgacaaggaactgggtgcacacatgggtgaggcagccaggcctggccagagaagcaacagacatgtgcacagatgtgtttacctacatacatgtgtgcacacacatgtgcaaacacatggcacgcaagcatgatgatgccttaggcaatgcaggatgctgactttgggccctgctgacccaggcaaggcgcctttgtgatgcttgcctttatctcagaatgtcactggtgcttagcacccgtccgctctctgccctgcctctgtgttctacagcagctacacacagacagtggtatctgtgagcagctctgtggactcaaaggttttctccctgagaggcgtaacccaggccagctgattcatcagaatcaggtgagtgtgacctgctctcttccctccatgctgacttggggacagtggctaatggtgtgggtggtgctggcctctgggcacgtgctgaggagggtcatccctgaacactcaccgggtgcccgttctacgctgcccgtgtggacagttgtctctttcatcctcatggtggctcccgcatgtacccatttgacaggtgagatgtctggggtcagagaggcggtaactggcctgggaatcccaacaggaccctgggttttgctcttggccctgccctgtgccatgttggacttcaggcctgaaccctgcggcctccttgccccagatcccaaatctgtccagggtttctgatccccactgggatggggcagagcctcgccatggcagagccactgagatggatccattgtgggtgaggtggaggggagggtcctcagaacacatctgtgccctaagctgggtcttgatggtccctgtgggacccactgaacacacatggtcctttgtccgagagtgggatggggagccttctgcctttgggcagtcgtggaaaatgaaggatccctggtgagctggctggagggagactgtcttccctcctgttaaaaggggtccaggtactggggttctccgcaagtatttctttctctgtctgatcctctcgaggcctcaccctccttttgccctgagtgttcccaggagggatggtccatctaggtgttctccagaaccaaggacccactgttcttcctcagtgacccaggaaaatgaagccccctcctgtatggatagctcagaatggtggagtccaccgtccctccccgagagatgtggtttccacgagcataggggctgctttggagacagtagattattttcatcccccaaaccaaacaccctcctgcttaactggcgttgttcctaaagtggcttcactggtgagactgaagggccacagtagcccaagtgatgagtggagtagaaccgagcagtcaggagaggtcttgttcccgtaggaaactgggcatctctgtggtccctgagcatcccaggaggccgactgtacagagacctctggtccctgaccccagtctgcctccacatccctggaatagcccatcatgggcccttcaaccttggcaggtggacaccattcaacatgctggggcaggtgtgtacccgtttcatggcatttggggacaacaggattctctgtccaggtcccagtattctcaagtccttgggaagatgcccacccctgcttggggcttgagactccagagacccatgcaggtgtgggccactgggtctggccccttttcacctgagggcagtggtggaaggggggttacaccgccaggcagaatctgggagccaggtgggagcggtttaggtattctccgaaggtctcaggtacagtgtaacatttagatgattttgtctcacaggatggacatggtagaggatgtggatactttgcaggagtgagaggacatcattatgaagtatgagaacgtacaggtccgtctgctccctggagggaggcctcttccagtgtgccctgctcaaaggatcctgggctccctaggagcacagggcagggacgggtggccactacccccagacccttgcacccgttaccttggacccctcatcaaggctccctctggattacagggacaccgagctgggctgccagcagacacggggcctaaagcctgttggaatctacagcagcactgatcgctttgggattctgcagtgagtcctctgtgctcccctcagcccctaaagcacttatttcagcttagggatgggtttacttttagaagggactttctgaagcagaacatgtctgcccaggtcgggccaacctcctttccaggatcagaactcctccctggctcccctgcaggtccagcctgaggttgttgttaggccagtggtgcggggcccatctagggagtgggtgggaatggagagggggctaggtcaggcccctgggctctcagcagttctgtctccgagttagcacaagaggaggggggcagcctgagggtctggccctgttcacttggagacaaccccagtgagatccaagggttgtggccacagggtgaggagacgcctggtccagcctcggggctgttgtccagcaggtctctgagggcccacctgcccctgttcacccccatttccctagagctacagccctcactgtccccatggggaagggggaaaggcatggggacagtaggggctgtggccttaggggaatgggggagaagatgggcagggcccagttctgggcatctcacggtgaggccaaggaggcagcagagcttgcagctaatgaccctgggtctggtgctgggaagggatctggggccaggtaagaggagcccaggctggagcccatccctcagggatcatagaatggagagatggaggatgccaagagaggtagggtgggagggagcttatgagccatgccacttctgaaatgcagtgtgtgtggcttgggtgcagggagaggcaggtggaccctgggaggtcagaccctgcaagggccttgggaatgtcgggtgggatgggcccccggtgtaccctagaccctggcaggtccacatcacgtggtcactcccagagggactcctgtcagggcccggtcaccccatcccatctcggggctgacctttctcagctcaagcacaaagcattacttccagtccaggggggcagcccccattttacaccctgaccaccccccacaccaaggggccccattagcctcggccaggctggccctgcactccctcttctcccaggtcctggaccttcctgggagtcagccccacaggaaggcccttgtcttcccttccctgtgccttctcctaggctgagccctgagctggatgggacagagccagtcctttctgggggtcggctcccagaccgagatggctccaaaccttgtgcaagtcctcagctctgcctgggctgcattacagtgagaaggaactgcccggtcagagcccgggaggtgaaggtaagagcctgatccatgggggggctggtccagggacggggggactcggcgagtggtcagtgaggcagagaaagcagcgggcctgggcggtagcaggtgggggcaacacgctgtcacttggaggggcagctgtccctgctggacctgaccccagcttactgtatctctggcagtttgatgaaattccaaagtgagaaccacagtcctggcttggggatggctgcccgcttgtgtcaggaccccacctagagactgggacctgacctaagactggtgtgtctgtggcctgaggatggcacgtcccagggtcccaaggccagcccactggcactcatttgctcaaaggccctcagcctttatggtctgcccttccctggctccttctagctgggtcccaccagggctccagagcccaagacccagcatccacgggtggctctgcgaagcctggcagctccgctaactccaacattcctcatttgacagcaaatgcggcaggagatgagatgaaagagcaagtggatggaaatgctgggagaatgggagacatatcagaacagcaaaaaagtaatgtgtggagggagaggcccccagaaccactctctgcagagacaggggacaggcacccatggctgtggcctggcaccgtcagcctctcagagggcaggtggcacacagtgctcacccagaggaccgcaggcctggttgccagctttactgcccgttcatgcaagcatcaccttgctgagagggaatctgaatctagggctggggatgcctcctgctgacccgaaggaaagaaaaggtccagatcagagttcaggactctgagtgcccacacactctttcaatcctgcgaagggagaccctgtcccagcttgacctcacctttaccgaggaatcatggggccaaaaccaaagatttccaggatcctcgggctctggtcctggctggggtcatcccatggcctgtgacaccagatcgttttctgcccacagctaattgattgagtgtataagggcattcccatgaacatccagggccaggtgtggtcagtcctcctgaacattcaggaaatcaagatgaaaaatcccagaaaataccaggtatgctaagccagagcacaacaaacaggccaggctgggtcagggcccagttctccagctagagggaatgtcttgcccagcctgggggagtgggtaccatggtcagatgcacatcctaagcacagaaggtgacataggaaccacagaccctccccagcttcagaaacaagccaaaaagcagctttctgcagaaggaagcctttctttccttccttccagaagtgctgactgtgggctgactaccatttggggcagggagtcttccatctgctctgaggctgtttcttcctcttggccctgtcctacaggtcatgaaggagaagggcaagagatcctctgaacacatccaccaggtctacctggacatgagctggacactagggaaccacatcttcttcagggatcgatatggagtcaagtaagcctatgggagccacagggtgccagcagagatggggtaaaccagagggatggggacttccccggagcagaatccagggtcacccaggagggacgacagagctgccaagggctcccctggcccagggagcagccggcaccatggacggagcacctcccaggttctaagccctgtgccaggctggaacatgtggggccagaacccaggaggatcctgcggagacagaaggcagcaaagaaaatcatgcacaatggtgaaagttgctctccctgacccacggagacccatggtaggacccacaggagggcagcaggatggagggcccatgagcctccccaggcaatactgacagcaccaaatgctggggggattcagtttcctggaaattatcatccaggtctgctgggaacgtgacatggcacagccactttggcagctggttgggcagtggctcacaaagctcaatggacttgaactccacgtccccaaagtgtcacagatattgaacccactgatttgaaaactgacgtcacatgaaacctgcatgccacattcactgcttgattcctcatcacacatacatggagccttcgggaacgaccttcaacacgggaatgcggagaggaaggctggtcctccctaaaacggtagaagactcagtgagaaaagggaacgagccagtgatgtccgcacaaacgtgggtggatcctagatgcattttgctaacggaaagaagccagagtcaacaagataccgctgtaggattccaatcatagaccattctggacaaggccaaaccatagggactgagaaccattctgagtggccagggactgacggatcggggagaggctggctgcatagagaccaccctggagacttggaggatgaaggagtcgctccagaaggctctgcacattggtttagaaccatggaagaactgtatacccaaagactgaactggcgtgcgtgcaaaccaaaaaaaaacaaaaaacaaaaaaaaaacaaacaacaacaacaacaaagaaacaaaaaacaaaaatcagagcaaaaatgatcagtcaactcactgtacaactgggctattattagcatttcacagatgtggattttactgaaacatttcttaaatagtcaaaggccctgaagagctcactgcttatctggtgaatcatctgaacctgaaattggatttgttattagggtttgtagacaaagtgaaactaacatctgcacaaaagaaacaaaagccccctgtatctgttttttaggcagcgggaactattctacatcctcctggcatattcagagtataacccagtgagtatttccagggagtgaccatattcccatgttcacggctatattcccggtccatatttccatattcccgggcatgggtgtctggtgtgggtgtcattgcttcttttaaagttagtatttgtgacccaccaggatataggaggtaggactccagcccactgctggcataaacctccaagcaaggggggtggtctcaaggggtctcactgagacacaaaggagtcgggcctggactcctggtgtcacctgggcctgaccaccccttcttggaacaagaaatgatgccctcctcctggggctgccccaaagctcaggagcttggcagtgtcacaagcaggacggtgctaacaggagacattttggacaaggtgctaaaaggcccaatggacatagctgtcgtcataaaatgaatttgcatcttgaggaagcctcttcttcagaggaagcctccccagtcacctctgccctctctgatgacatgagtcctcccaggtgacctcagccctcccaggtgatgtccttccacggtgactctggctcttgcaggaggtgggctactgcagggacctgagccatgtcactgccttgttcctcctttatctgcctgaggaggatgcattctaggcactggcgcagctgctggccagtgagaggctctccctgcagggtaggtggacagcggctcccggggcctcatgcagtcagacccggggagagccaccctggccaggtgatctcggctttcagtgaagacaccttccttgtgtcaccagctaactgttgggagcctttaggatgtctctgcctcacgcggtcagacccagagagagccaccctggccaagtgatctcggcttttattgaagacaccttccttgtgttgccagcttgttgggagcctttaggatgtcccacaggagcccggggctgacccccagagcccaagtcagacacctttcatcttcatcagcagaaggcatctcatcttccccaaggccgccctgtgtatcatggagccacgccctctggctctgattctgtgcagctgactctctcctccctgagagtcctcttgcccttcagctgcccaggctccagcttcccttggtacccacaaatgggccaaccaagcccagatggcagcatctccccatcccgtgtcccctggcccggccccacttccaggagacgaccacgaagcccagcacccaccctattctggccaccccctgtcgtggcctcaaagtcaggcttgccctcccggcaccctggcccaggaggcctccaggggcacctccagccaggctccaggggaagctctcatcaccctccccagggccaaggccacatggtggggtcaccagatgggagggtgggaggcctcggggtctggggggctctgcagctgcccagctcttccagctgatggctccacatcttgggagagggctctgatttcatgatgggctgggggcttctcaggattccacagcccaaatggcgggacagttcaggggctccaagaccatcaggagcatgtggtacccatgtaacaacccaagaccatgtgtcatctggtgagtttatggttccttcggctcttccccagaggccctgcatcctagggggctggaggagcagcgggggctggagcccttcatggggctggggacaggctgagtcccagccagggcctgacctgggatgtcgggttccccatgggctgggagttgggtttcctttccagccctggaggcgacagaggcacagggatgggggcccagctcccacagagcagggctaagggtagtgtgtctaccgggagtgccagaaggggaagatgttggggggagcccgggacactgcccagtgttctgcacttggggaagggtcttcagagggccctggaagagggaggtttttagggcagcccatggggccctgagtacctctgttcctcccatcaggacaaggaaggtcaatgcacacagggttcctcattcagctggcttctctgggtgctgaatgatggggtaaggaggcacagggagaccctggctcagggaccctccttgccctgcagtgccctgcttccccagcccaggggtccggctcacccccagcccacaggaggctcaggcagatccctacatgacacacaggcaagaccctctgccgaagaggtgtcattccagggcagagggtggggctcaggcccagccttaagggcagactgggccagggcctgacttgggagggctgaggggaggctcaagccctggggaagcccctctctccactgaaatgagtgcccccccataaggagctgcaagaccttgtctgacccagcctcctggaggggtccggtgactctcatggggaaggtcactgaagccccaatgggctagctcgagccaccagccccagcctggaagggccaggtcctctcatgcctactttccccacagatctctctcgggctcaccccgtgcctgtgggacatatatttgctggaaggggaacagatgttgatgctgataacaagcactgcctttaaggttcagaggagcaagtccacgtgtgcccagtggggcctggggagcactggggtcagaccccaactagcccaagggcagcttcctcacactgttctcatgattctctgttctggcccagagggaggtctggccaggtgggctgggcagggcacagtgacaccaagcccatccctcacatgacccagatgaaagtcaggagtgtgatgagcacttccctgcccaggctgcctccccagccacagccttctgtgcacatctggacccctggggtggccacaaaaggatctggcactgcccagtgggagactgaagtggtcacggggtgtgggctctgacccttcccagggaactctcctggcctgatacccaccttgtccctagagcgccacatgaagatgtccaggtctggcctgtgggcacgttttcgagaccagttcttccatatctgggccctggatgatgacgctgttcttttttttttttttttttatactttaagttctagggtacatgtgcacaacatgcaggtttgttacatatgtatacgtgtgccatgttggtgtgctgcacccattaactcgtcatttacattaggtatatctcctaatgctatccctcccccttcccccaaccccatgacaggccctgctgtgtgatgttccccttcctgtgtccaagtgttctcattgttcaatcccaacctatgagtgaaaacatgcggtgtttggttttttgtcctcgtgatagtttgctgagaatgatggtttccagcttcatccatgtccctacaaaggacatgaactcatcctttttatggctgcatagtattccatggtgtatatgtgccacattttcttaatccagtctatcattgatggacatttgggttggttccaagtctttgctattgtgaatagtgctgcaactaacatacgtgtgcatgtgtcttgatagcagcatgatttataatcctttgggtatacacccagtaatgggattgctgggtcaaatgatatttctagttctagatccttgaagaatcaccacactgtcttccacaatggttgaactagtttacactcccaccaacagtgtgaaagtattcctatttctccacctcctctccagcacctgttgtttcctgactttttaatgatcgcctttctaactggtgtgagatggtatctcattatggttttgatttgcatttctctgatggccagtgatgatgagcatttttcatgtgtcttttggctgcataaatgtcttcttttgagaagtgtctgttcatatccttcgcccactttttgatggggttgtttgtttttttctcgtaaatttgtttgagttctttgtagattctggatattagccctttgtcagatgagtagattgcaaaatttttctcccattctgtaggttgcctgttcactctgatggtagtttcttttgctgtgcagaagctctttagtttaattagatcccatttgtcaattttggcttttgttgccattgcttttggtgtttagacatgaagtccttgcccatgcctatgtcctgaatgctattgcctaggttttcttctagggtttttatggttttaggtctaacatttaagtctgcaatccatcttgaattaatttttgtataaggtgtaaggaagggatccagtttcagctttctgcatgtggctagccagttttcccagcaccatttattaaatagggaatcctttccccatttcttgtttttgtcaggtttgtcaaagatcagatggttgtagatgtgtggtattatttctgagggctctgttctgttccattggtctatatctctgttttggtaccagtaccatgctgttttggttactatagccttgtagtatagtttgaagtcaggtagcttgatgcctccagctttgttcttttggctcaggattgtcttggcaatgcgggcccttttttggttccatatgaactttaaagtagttttttccaattctgtgaagaaagtcactggtagcttgatggggatggcattgaatctataaattaccttgggcagtatggccattttcacgatattgattcttcctatccatgagcatggaatgttctcccatttgtttgtggatgacgctgttcttaatcatctttgggcctctatgaagaaactaacaaggaagcatggggacctgccacccccaggtgggctccagtaccaggtcccctcctgagtcaccctctggggcagtcaatactgggggagtacccaggacccctaaccctattacttgggtcttcctcttcaccttttcttcctcctcttcctcctggactctaagaaaatacaggaggcccaccattcctcagggcaggcgctcagtgcatatgtactggatgtgctgtgcacgcaggagggggatgtgggcaagaccctccaacaagccccctcccacttcccacggtggcctgctctccccctcacagggctctcaagggcactggaggagccagacccatttgtgagagcctccactcctccctgcaagcgctgacagcctcagagagcaacagaggcccttcactcctgcagactcctccaggggtgccaggacaacaagccttgagccagggagacaagggaatcagtgtctcttacccatagagcattcagagagagggcacaggtgggacccctggcccagagccagagccaagtgtttagccaggtgtgggaacggtcagtcctggtatggacggggcagcccaggagggcagagggtgacccacgtccaggcccagtcacccactgtggagacgggtccccatgtgaagtggcaaggggctggtgacatccaaggcccctcccacctgagttctgactgggggccatatcccaggcccaatagccctgggatgagggtgtgtggcaggaagcccccagcgaggctgaaccctgggggcagttccagaagccacctgccatgcccaggcagcttccccacaccaggcggcacacaacccttcctctgggatcagcagactataggcatgtcatcagtgtcagaccacaggggccacacagagaccctgaggactccagagacccaggcaggtggggcccagcccagaaaggcctgcatgggctcactggagacactgaccacgtctgttttcctttcagcaaaacccgagaaagggtcctcaggacccaggtctgtgctggcatcacatggcgggaagaccctctgcaagggggacaggaaggcccttcccggcccaccagcccggttccagcggcccatttggtccgcttctccacctcgtcctacaccctgtcctggtggggctgtccatgaggccaaggcccaggaacatgtgggggcttctggggagcccagggcagcagaccactctctgggggcacctgggactcagggcatgcccagcctggccccggctcagggaggacctcggcgttcctggagattcctgcagtggaactctatgctccagctcccgacggacctggatgtggggggcccttggttcccccatgacgatttcaaacagagctgctgggtccatgtcccttctaaatgtgtcctggacagccccgggaccatgggacaggcctagcccagggagcccaaggggaccctgacaccgggcccagcccaggcccatcaggactaagagggaggtcgggagataaccccgctgcaacatgggcacctgcatctggtcaccgaagccagggtggcaccccgccagctgccctgcagccccagacacctggaaaatcccattcaatggggaggccggtcccaccaaggccacgagagacagagaggtgagcatggcagccccggccagccagcagcatgccctggggcctctgtcccaatctgcgggcctgtgtccccctcccagtgcataattcccaggcaagaggggcctggtctagaccccagccctgggaagagaggggcaccaggggtgtggtgggctcccagttgcagtcagtatgaccatgcaggggaccctggcgctgcagagctctgccactgtcacaattcacctcacagaagccgggtgagtcccgaagccttgcagccactgctgtagcccttgcagacaccacgaccaggtgccttccagctgccagtgcaggttttcctgacaggagggcaccctgcagccctggcctcagcagctcagactctgaaggtatctgttattcatgtttccagtactcccaccaaagagaattactatggaggatgatgttggtcctgagttgagcaaaacagcatgccctgtggatggagccggcttctttccaagccaccacacttgctggatgggcccacggagcgagtggccttgagaccggcatgaggatggaagaggctcagcatcctgcacatgccctttccaaggctcaccaggctgacaccacatttgtggatgagagactcacacccagtccctgggatggcacaatttcccaggaggatcagctggccacctgctggcaggctgaccacactgcgaaggggctgagattggctttcactgcactgagccacaatatggacatggacttgtgggccctgcagtgcacacagcattgcctccgagcaggacaccccattcacagctagggacaagcagcagtgcgcttccacctcggggccttggctctgccacctctattttgaatgttctcagttccctccaggctactagaagcatctgggccagggctcatggctagataagcacccgagatcccaaacaagcttcccatcctcgttttactttttgttaaacttatgaaaatttattaagatatgacttacatccctggtaagtgcacagctcaaaagacattcagagatggaacacaccagcccccagatcacaaagccaaccatgcccagcccttcccagcacccccagccctgaaacctgacttctgacgacaccatgagcctgcctttatactttacactcatggaaggataaccatcttcatgttgtaaaataaatgtttactgttgaaatgattttacacgtacaccttccatccagctgcccttaataaggacattttgcagtaccatggcacataagaaatttaggccaggtgtggtggctcatgcctgtaatcccagcaatttgagaggtcgaggcaggaggttcaggttcacttgagcccaggagtttgagaccagcctgggaaacataggtagactctttctctagagaaaagtaaaagaaattgccaggcgtggtggcgtgtgtgtgtagtcccacctagtcaggaggctgaggtgggaagactgctttagcaattgagttccaggaagcagtgagctatgatcacagcactgcactccagcctaagtgacagagtgagactttgtctcttaaaaaaacaaaataagaaatttaacatgggtgcaatcctattaactaaatgataatgtgaactattatctaaggttattaatgcagtaattatatgaatagggtgaaatttattcagacttcacccgttttcgcctagcttctcatacctgtccagggatcccacctctgactcaccctctgcctttaggtcatgtctccttagcttcctccaggttgtccagccaaacacacacctgggctgagtggtagagctgattgctcctgggctccaaacctctacagcatgttaccatattgagtactgtaggaaatggtaacataatggtggctatctgtgtatctaaacacagaaaaggatcataaaaatacagtataaacaatacaaaatggtacacctcgccagctgtggtggttcatgcctataattccagcactctgggaagccataatgggaggatcacttgggcccaggagttcaagactatctgggcaacataacaaggccccatctcttcttaaatatcaatttttagagatggtacacctgtataggatggatccattatagccttatgggaaccaccatcctatatgcattctggcatggactgaaatgtcgttatctgacacatgatcacataagtaatctagagataattttaagcatacaagaagatgtgcttaggttatatacaaatactgcaccattttatatcaggactttggtatctgtgggagatggggaaactgattccccacatacattgaggggcaactgtaaacatttcaggccccacagaaggctcaattccctgcacccccaccccgaggtaaattcttttactggagattagtttgcctgatgataacttcatataaatggaatcacacattatctattcttatagatattattcttatagacctattcttataggtctaacttctgtcgctcacacatgagctgtgtgagattcattcatgttgtagccacaatttactcattttctttgctgtatagtattctagtcttgaatgtcccatggttttttatttattcttctgtgatgggtattttggaagtttctactatgaggctattacaaattgtgctgctatgtgggttgttttacttgtattttagtgaagatatagacacatctgtgtaaggtacacacgaagggaggaaattgctagctcatgggaggcaaatgtttagctttggtgaatattgccaaatcattctaaagtgtctgttccacttcacctgttcatctgtgagctggagcattccatccacagcttgggctgtctcagaaagacccgggttcaatcccattcagccacttagtagctgtgtccctttgggcaaaccatgtaacttctctgagtctcagggtcctcatctgtaaattgggctgctggtggtccttacctcacagggccactgtgaggactaagtgagatgaaagctgactccctgagtggcaccacttctctctccctcagactgaacaggaagatgccttcactgcccaatgcgaaggccatggggaggacgcgaggccccagggctcctctgtcccaggagcataagccctgggtttttgtttccagaaacaaccacccctggggtcaggatgactctcaagtccccacagcctgttctcccaccccacgaaggcgcatcttcagcagtggggaaagggctgcactgtgccatcctcaccctggccactgtctgccctcatgactcagagcacagcgaggtcaccaagcagagcagtgcagggtccggccccagccctgggctctagacatccaagtcacccccacctgccccaaccctgccccctccatccctcagcccccgcttgccactttcacagctcaggacattttagctccttacattttagctccttacatgacaccatcatctgtctcctcaagcggagtgcagcacaagggcagtgaactcagtcagtctatggatgtgtctctggtgtctgggagatgagaagctcaatacatacttgctcagtgtctgcgtgcatttcattgagcagaagacagctttggaaataagaagagaccctcccgaggtgacagtgcgtagctggcattttccaggtattctcagcatgccaggcggtgggctggaccatggacacgggagctctggagcccgtggggtgccaggttacaggccgcgcctggacggaagtattgtttatttctttattaaaatttgtactttctgagtttatgtaattagcaggtgttgcctttgtgatcagaaacagtaaaggtatagaaaaaaatgtgtagaaaaaagcagaaaaacaaatcacatctataataaaatccttgcttttaaataaaatgtgcagagaagaaagatggaaaagaaacgcagtgagccgggcatggtggctcacgcctgtgatcccagcactttgggaggccacggcgggaggatcgcttggggtcaggaatttgagaccaacatggtcaacgtggtgaaaccccatctctaatgaaaaaaaaaaattagcagggcatgttggtgggcacctgtaatcccagctactcgggaggctgaggcaggagaattgcttgaacctgggaggtggaggttgcagtgacccaagattgcaccactgaactctagcctaggcaacagagcgagactccgtctcaaaagacaaaaacaaaaaaaaccttaataattgtcatctctgagggctggggatatcaggaaactttgcttttctgtctaattttgtatatgctcatctccagatttgaatgtattctattaaattcccttagcagcctcctcattagtctctctgcccccattcctgcccgtgcctgccgtgcaaaggctcccctggcattgtgctagagaaagcaggttgctcctagaaaaagtctccgttctctatgcctagttaacttccgcttacccatcagtactgtactcaaggtctccccaactactttatggaagacttctgtagtggatactgtgacctgccacccagacgtccacttcaggatcagggccctcattccctggctgctaggagacttggaggtggatgctggcagatgagtcttactctgggaaatgccctggctgaacggagctgcctggggacagtctacatccattgcctagttcattggagcagggagatggggtgggcaataaaagcccagacccctcgcctccattcactgcaactttgaagggtcatctgccctctagagctccctgtgggagtggctgagacctctgttgcaactggagtgcagtcactctgtctggccaggcctgccagcttcaccctctcacaggtgctggtcctgagggtacttcccaaggaacttccttaaccagtgacaactagggtagattccttaactatatgctttttcagggcacatatcgcctttgtaagttttacatccatttgtggtatctggctaatgtctgcctgtcccatcaactgtaatagccacagagtgggagctctatctgattttattcaccattgcattctgccatgctggcatgcagtttaaaaatatttgtagagtgaacaaacaattttattacccatctaatctaatcccttaggaggccatcagctttacttagggctgcagaatgtctcattcattcattcaataaatatttacaaggagaagctggattcctacctctcaacaccaaaacaattccagatggttcaaagatggttatatgtaagaaaatgaaaccaataactttctagaataaagatgagtaagttttagaaaaaaaattggtgggccgggtggggtggctcacgcctgtagtcccagcactttgggaggccgagacggacagctcatgaggtcaagagtccaagaccagcctggccaacatggtgaaacccagtctctactaagaatacaaaaattagccaagtatggtggtgtgtgcctataatcccagctactcaggaggctgaggcaggagaatctcttgaacctgggaggcggaggttgcagtgagctgagattctgccactgcactccagcctgggcaacagagcaagacttaatcttgaaaaagaaaaaaaaagaaaaaatttggaatattaagggccttcataagcatgaccacataaaattctaaacctttataaagcgaaaataaagattaataagctgggccaggcccagtggctcatgcttataatcccagcactttgggaggctgaggcgggtggatcaccggaggtcgggagttcaagaccaccctgaccaacatggaaaaaccttgtctctactaaaaacacaaaattagccgggcatgatggcacatgcctgtaattccagctacttgggaggctgaggcaggagaattgcttgaatcagggaggcggaggttgcggtgagccaagatcatgccattgtactccagcctgagcaacaagagcgaaactccatctcaaaacaaacaaacaaaaaagattaataaactggccaggtatggtggctcatgcctgtaatgctagaactttgggagattgaggcagaaggattgcttgagggaccagacagggcaacaaagtgagaccctgtctctacaaaacacacacacaaacaaaaatcagcaggtcatagtggtgcatacctgtagtcctagctactcgggaggctaagacagggggataacttgaagccaggagttcaagactgcagtgaatcatggttacacttgtaaataaccactgcacttcagcctgggcaacatagagcccgtctatatttatatttgaaaaaataagacaagtaaagaaaaagcagccaataaggaatatttccagctaggcacagtagctcatgcctgtaatctcagcacgttaggaggccgaggtgagagcatagcttcagcctaggagtttgagaacagcttaggcaatgtagtgagaccccagctctacaaaaaatgcaaaaattagccaggtgtggcagtgtgtgcttgtagtcccagctactcaggaggcagaggagggagaatcgcttcagcctggaggtccaggctgcagtgagctgtggtcatgccactgaactccagcctaggtgacagagcaagaccctgtctctagaaaaagaaagtaaaataaaaaatttaaatgaagagtgtttgcaatgcctatatatgacatctaatataccaagaacacttgcaaatcaaaaggttaaaaagcctacagaaaaatgggcaaagaatgtgaaaaactattggaaaccttatttctattctatgaaatgcaaattaaaataataatacagtatcactttttctataaaattgactgagttgaatgattaacaatacccagtcttggcatgagtgtagataaacaagaaatttaattcacacttgttggcaaaagttgtcctgaactctggagagcagtttggcaatgtctattaaagcattcactatttttgacctcacaaccctacttctaggaatttatttgtctaaggtcatgtttttgtacagtctgtacaacatagagcattgccacttttataattgcaaaaaagatgcctgggcaacatagtgagactctgtctctacaaaaaaaaaaaaaaaaaaaaaaaaaaatagccaggcatggtggtgctcacctgtgatcccagctattcaggagacaggaagaaggatcacttgggcccaggaggttgaggcggcaatgaactgtcatcataccactgcactctagcctgggcaacagagtgagattctgtctcaaaaaaaaaaaaaaaaaaaaaaaaagaaagaagaagaagaaaaaagaaagggtggccaggtgcaatggctcatgcctataatcccagcacttggggaggccaaggcagccaaggtggatcagttgaggttaagagtttgagaccagcctgaccaacatggtgcaacccatctctatttaaaaaaaaaaaaatacacacagagaaaaatagctaggtgtggtggagggcacctgtaatcccagctactcgggaagcttaggtgagagggtcacttgaacttgggaggtggaggttacagtgagctgagattgtgccatggcactccagcctgggcaacagagcaagactcccatctcaaaagaaaagaaaagagaagagaagaaaagaaagaaataaaaaagagatggaaggtttattaatgcagattgtttaaatacattgtgattaatctatacactcaaactctaaagatctatcttaaagaacaaggcacctctctgtgtaccgaaatgcactcactgcatgtacatttgtattgaaatataagcataagcaagtatgtactctctatgtatgtggaaagggtccataatacattaagaggaaaaatcatgcgctaaaggaggtatttcccattttggaggcagggaggaaaatctggtgtgtgcatgtgtgtgagagcaagtgcattagaatatgcacagaaaacacatctgcgaacgcatagtacaaatgcttactaatggagagcaggggtgctggccagcttctactctgtcatgtatttccattgtgttcaacttactgataatgagctcatgtgacttttgtaatcctagagaggggacagcatgtgtgaaggtctgaagctataggatgcatttgggaaaatactaaaattggccccaaaaggatggcaggaagagatgagtctggagaggaaggcggcaggcagttggcccaggttagcccacgctctgccgaggagcgtggggttcatcccggtgcagcaggttttctttgtcctcgctggcagctcctctcagtctctgaggctgcctcctcatcttctgcccacatccgactgtggaagtttctaatctaatcccttaggaggctgtcaactttacttagtgctgaagaatgtctcattcactcaataagtatttacaagcccagtgaggtggctcatgcctgtaatcctaacactttgggaggccgaggcaggcagatcactttcatctaggagttgagagtagtctgggcaacatagcaagaccccatctctgcaaaaaataaaaaattagtcaggcctggtggcatgcacctgtggtcccagctacttgggaggctgaagtgggaggatcacttgagcctgcaaggtcaaggctgcagtgagctgagatcttgccactgcactccagcctgggcaacacaacaagaccttgtctcaaataaataaataaataaataaataaataaatacttacagagagaaactggattcccacaggctcagtcctgatgagggtcagtcctgcttcctcatcccttctctgtctacactgtctcctgtgacatcatccgtgttcctggttgtataaagcatctttgtgtgcccctcctatgtcctctctcctgcttggtctccctctgagcacagacttggggatgtaactgcctccttggcaccttcatctgatagacatctcacatcaaaaactcaactctggcttttagtcaccctgccaacctgcttttgttctaatcttcgtctcagtaaacagtgccaccgtccacccacttgccaaggccagacacctaggagtcttctttttttaatttgattttaatttttgttttttttttgggacaaagtctcactctgttacccaggctggagtgccatggcacgatcttggctcactgcaacctccacttcctgggttcaagcaattctcgtgcctcagcctcatgagtggctgggattacaggagtgtgctgccacgcctgactaatttttgaatttttagtagagacaaggtttgccatgtcggctgtgactggtctcaaattcctggcctcaagagatccacccacctcagcctaccaacgtgttgggattacaggcatgagccactatgcccagcctctctaggagtcctcttgatgtccctcttttcttccctgcctcctgctcctccttacaatccattatcgagttttgcctgttttatctccaaaatagacctcaacttgtccccttgttcccatgactcttgttactcctagtccaaagtgcaggaataaacaaagagcactcaaatgagaacaagcaaagttacttactcagagtttgccacagaaggaggtcagcaaccatcacctgcatttggcagagcctcaagggtagggcaaagtgagggaaagctctttctttctttttttctttctttctctttctttctttctctctctttctctttctttctgtctctctctctctccctctctctctctccttcttccttctttcttttcttttcttttttttttgacaaggcctggctctgttgctcaggatggagtgcagtggcacaaacagagctcactgcaacctctgcctgcctcccaggctcaagccattctcccaccttagcctcccgagtagctaggactacaggcatacaccaccatgctcagctaattttgtttatttttttgtagagatgaggtttcaccatgttgctcaggctggtcttgaactcctgggttcaagcaatccaccctcttcggcctcccatagtgttgagattacaggtgtgaaccaccatgcccagcctatttttttttctttccctcccccccttccttccttccttccttccttccttccttccttccttccctccctccctcctctctttctctctctttctttctttctttttctttccttctttccttctttagggagtttcacttttgtcacccgggctggagtgcaatggcgcgatctcggctcaacgcaacctctgcctcccgggttcatgagattctccagcctcagcctcctgagtagctgggattatgggcatgcgccaccactcctggctaattttgtatttttagtagagatggggtttctctatgttgttcaggctggtcttgaactcccaacctcaggtgatctgcccaccttggcctcccaaagtgctgggattacaggcgtgagctaccacgcccagccctattttcactttctttcttttctttccttttttttttttttttgagacagtgtctcactcggttgcccagggtggggtgcagtggcatgatctcagctcactgcagcctctgcctcctgggttcaagcaattctcctgcctcagcctcccaagtagctgggatcacaggcacctgccaccacgcccggctaatttttgtatttttagtagagactgggtttcaccatgttggccatgtcagttctgaactcctgacctcaggtgatccaaccgcctcagcctcccagagtgttgggattacaggcgtgagccaccacagttggcctattttcactttcttaatagtgtctttggaagtgcaaacattttgaactttgaagaagtctaatttatcaattttattgtgttctatctatctatagatctatacatacagacacttcctgatttgcagtggttcagcctaacaattttttgactttaccatggtatgaaagacatatacatgcagtagaaatcataccaagtaaccataaaaccattctgttgcccaggtgaggtggctcaaacctgtaatcccagcactttgggaggccggaagcaggcagatcacctgaggtcaggagttcaagaccagcctgaccaacatggaggaaccccatctctactaaaaatacaaaataagctgggcatggtagtgcattcctgtaatcctagctactcaggaggctgagacgggataatcacttgaacctgggagacggaggttgtggtgagccgagatcatgccattgcactccagcctgggcaacaagagcgaaactctgtcttaaaaaaaaaaaacaccacacacacaacaacaacaacaacaacaacaacaacaacaaatcctggctagcacagtgaaacactgtctctactaaaaatataaaaaattagctgggcatagtggcacctgcagtcccagctactcaggaggctgaggcaggagaatcgcttgaacccgggaggcagaggttgggaggttgctgtgagctgagattatgccgctgcactccagcatgggcaacagagcgagacttcgtctcaaaacaaaaacaaaaacaaaaacaaaaaaagaataaaacattctgtttttcactttcagtacaatattctataaattacgtgagatattcaccactttattataagacaagtatgtgttagatgatgtggcccaactgtaggctaatgtatgtgttctgagcacatttaaagtaggctaggctaagctatgatgtttcataggttgtgcactaaatgtatttttaacctgattattttcagcgtacgatgggtttgttgggatgtaaccccatcataagtagaggagcatctgcatataatttttttgtgtgtgcacatatttttaaagtcttgctgacaggatttgctaatgaattagatttcgggtagtgaagaattaagaatgattccagtggttttggtcaagcaagtgtctaagatgggggaaggctacagaagccaggaagttggggatgggggatcaggagctctgttgtggatgcacggagtttgagcttgtctgttagaaatccctgtggagatgctgaaaggcaggtggaatctggagttcagagtcatttgatagattaggtggatgggtgaggtggcagaaggccaacaggggtgagagggtggactgaaaggaggagagaattgaggcctgcccggggcatctgcacttagaggttagacaatgaggtaaacccagcaggaagacgaggagtggccagtgaggtgtagttaatcttcctgaacgttagtttccttgtaataactaggcagtagtcattaatagtacttccctcatagcatgatggtgaggttcctggaatgtgcactaaaagtgcttagagcagtgccttgcacgtaggagctgctcagtgcgtgttagctaaaaatgagaatcttctctaaaccttctaaagaattgtcagaccttgcctgctggccttagttatcaggtgagagcatctacagagaaacttggagcccacctcagccaggtggcctgggcactgtaggatgccagctgctcagggggaagactactgcccacagcctggcaccatcaggctggccaagacacatcaccaagccagcaggtttgtgcaacagacttggcttccaaaagggaggccctgaaggcccagagaccctcagggatagggcctggctgaagactgtggttaaggaggtgagaatttcgagtctggtaattcttctattaaacagaaatgtgacttcatactcctgagcctcgaagcctggacttaaatattaatccccagtgggtgaggctgtgtaccaggtctagctacataatttgcagaccccactgaaaaagcaaatgtggatctcttggtcatgtgtcatgaggaatgtaaaggcagttatagcagagcattaaaccaagtgtggggcccttagcaccagggccctctgtgactgcacaggtcataggcccatgcagctggccctgtctggccctgtcttgtttccatccacaacgatgggggaggacagagtctggaaggttgaagagggaggcactagacactcgtgggtagagagagcgctctgggtgcagtgtgaagagtgggtcacggtgagcaggggtgctcggggctgttggagctccatgctgagatgggataaggtctgcccagatgggtggggaaggaatgggagaggagcgggaccctctctctggggaggttgccctgcagctttctggccctccctgtttcctgctcagtttttttgccttctccttgggaattctcctgggactgccattctgggatatgcatttttgtttgtttgtttgtttgtttgtttttgtttttttgtttttgttttttttgagacagtttcactcttgtcgcccagggtggagtgcaatggcatgatctcggctcactgcaacctctgcctcctgcgttcaggcgattctcctgcctcaccctctggagtagctaggattacagttgtgcacccccacgctcagctaattttgtatttttagtagagatggagtttcaccatgttgttcaggctggtctcgaactcctgatctcaattgatccaccctcctcggccttccaaagtgtaggcatgagccaccaggcccagcatgttcttttattccactccctttggtagagagggaagcttccccactggtgtgggggctgagagcagatttcccccactgacagaaacgtagacaccacaacccctccctcatggcaccattgctatcccttcaggaactgcggcttgggatgtcctgttgagtcacatcacacccagcctctcactggcattgactgtctatgacattcaaaggcagaaaaagtacaatatgactttatttcttaatttaatttaatgttcatgaagcaaggattgaacaatagaacttaacaaaagttttagacaacctctgtcttatttattaattattttttatttttcagattgggtctcactgtgttgctcaggctgtagcacagtggtgcgatctctgctcactgcaacctccacctcctgcctcagcctcctgagtagctgggaccacaggcgggcaccaccacgcctggctaattttttatatttttggtagagatggggtttcatcatggtactcaggctggtcttcaactcccgagctcaagtgatttgccgccttggcctcccaaagtgctggcattacaggtttgcaacactgaggctggccaatacaactttttttttcttttttgagacggagtttcactcttgttgcccaggctagagtgcagtggcatgatcttggctcactgcaacctccacctcccagctcaaggcatcctgccacctcagcctcctgagtaatggggaccataagcatgcaccaccacgcccggctaattttttgtatttttagtagagatggggtttcaccatgttgcccaagggtctcgaactcctgggctcaagtgatcctcccacctaggcatcccaaagtgctgggattacaggcatgagccactgtgcctgggcaacaattttaaagaaaaaaataataagaacggtgtcaccaaaactttggcataaggaacctagatactgagcaactaagcattcctctcagatgcccagggcacagggaacagatgaggcatttcaatctccatgaaatggggagcatagctgcaggaagggcaatcatcataagccctagtgtctttagtttacccctccccgcctaggcacttaaccacccacccacatcactccagtcccacctgtccaggggaacaagaatgtcagaagacaagaaacgattcttgaatggtggaatttcaggcaccatggttatcataatatgtgttgtgttcatgggtgcgtgatggcggcagagggatctttgtctcctaccggggacgagattagtgttgcctctacttaccataaaatgggtcctcccaggatattaaatccagcttgtgaaagatctctgtgttaaattgacccactcaattcaatgatgaaccgcaagctttttggagcactgtgatatgtgagtggggccctttctgcaaagagctcacaggccagtgcaagagtaagaaagcagagagttttgaggcaggagtgtcccctgacactgaggacaagcatgggagactttggtggcttggaagaaatgagctgggccagcctggaggtgagggagggtttccaagaagaggtgacttctgagtcctgagtggtatatcgctatgtaggagtgaaagtggtggtggtctccaggcaaagagcgatttcaaggtcaattggcttgtgattggagcaccttctgctcggactctggatcccacgactcgagcagattcgaggcctccatttcagcgagtatcctgcttttctctgcactaccattttatcccttttattctcatttgcacacaaacatgttctagtatctcccttcaagaaagaaagaaggaaggcaagacagaggaagggaggaaggatgggaggaaggaaggaaggagggaaggaaggaaggaaggaaagaaagaaagaggcggggagagagagggagggaggagggagggagcggacctctctatcagttagggtcctggcaggaatcataatcggctcagatggctcaactgatgtcaaagaggtctaggctatgtttctggttattctatgaataaaacccactgagctaatactgattaccttttgactaccactgtggcattcaagcaagctgatataggtgaaaggacttcaaagagtttaaaaaacaatggtacaacagaaaatcaactcaatcaatgaatgatcatcatcatgacttatatcacagatgtgaaagtatctcatggcattcagatcccaggaatttttgttcctggactcaaacacttgctgcatttcctgcaggcaggcaacagagcaagggcattgaaaacatgaattcggcttcaatgaatttatctggaatggtgcaatcggaacatctagaaagagactgttttcatttcaccatacatttagatttcgtgttttgtggtttttagtgttatttttattttgactcatatttgtgggaatagatgccataatcccttcaatgctttgaccctggaaaggacattacgtcatccttcatttctagtcactcctcatccccttccaaacaacctgccagaaacagctgccagccctcaactcactgccccaatctgtgtgcatcacctctttctgtagcctgtgatcattgggaagcttctggaaaataatatcctagctatggaaatgattggcactgttccagtgtgcttactcatgcagggctcagaggctgggggctttctgtgtattgctcacttaatctctgtgacaaccctactcaggcaattttcagataagaaccctgaggctcagagagataaagtgacttggttaaggtcacattgcaaaggagggttagaaatgaaatttaaacaatttccgcttctgcagccctggcctttaaaccattcttcatgctgctgcctcatggaggctggaaccagagggggcaaagagatgacctcattctgagtcttcactttatggaattatatgtcaataatacgagacctcatcaactcccaaatccaggttgccagatcctctgttcatatttcacatatatgtgtaatatatgtgactataaatttaataggaaaggaagtttcctttaaaagacccagtagaatatttaggtgcctatgaggaaattcagtcttgcaaaagtaaaacagtggaacttctttttttgtgttggttttttttgtttgttttgagacagggtctcactctgtcacctgggctggagtgcagtggcatgaacgtggctcattgcagcctcaacttaccaggctcaagtggtctcctgcctcagtctcccaagtagctgggaccacaggcacatgccaccatgcctggctaatttttgtatttttttgtagagatggggttttgccatgttgcccaggctgatcttgaactcctgggctcaagagatcctcctgccttggtctcccaaagtgttgggattacagatgtgagccactgtgcccggccaagcacagacaactcttccaagacgtcttgctataaacgtaagcagagaaagggcagaagctggaaggggatttggggatgagggaaggtgtgctggccattatcccatccaaggtccattcactgtccatttgggtcccactctgggccccgggggagagagacccttttgcactgcattactggggctcttctggttagaacacttccatatgggttcagccaaggggaagcaaaggcaggagaactgaaggctggaggaaagagagagcaggtgttctgcccatccctctctgcttcagtgccctgtctcgggcaggagctgtgtccccctccatgcctgcagttccttccaggctgcccttttctcaatggctcctggaatgctatttcttcccttggtcctttctgggccaggagttgtcaccctacaaaccttcatttgtctctgggtgctgcaacatccttgtttgttcccttaactttgttagtagcctctttgaatcagttgaaccaactgagagaatcctgatttctgccaggaccctaactgatagagtggtccctccctccctccctcccttccttccttccctccctcccttaagggagatactagaatatgtttgtgtgcaaatcagaataacagggcagatggctgggtgcagtggtttatgcctgtaatcccagcattttgggaggctgaggtgggcaggtcgcttgaggccggaagtttgagaccagcctggccaacatggtgaaaccccatctctactaaaaatacaattagccaggcatgatggcaacatgcttgtaatcctagctactcgagaggctgaggcaggagaattgcttgagtctgggaggcggaggttgcagtgagccaagatagcaccactgcactccagcctgggtgacacagcaagactctgtctcaaaaaaaaaaaaaaagaataacagagcagaaagggagaaaatgatgatgcagagaaaagcaggatactcactggatcaaaggccttgagcctgctcgagggcctgggatccacagtcccagcagatagacattgccttagactccagcaggatgcctcttcggcggttgcaggaggaaaggcaggaagcctgggcgcaggggcaggagggttgatagatctggcctgagggctttgagtttctcaaaggagggcgagccatgcccatcagctgaggagtgcaggggagtttgtgcagatagaagacagtatgaaacagccatctcagggaactggaaaactttctaggaaaggttggtgggattgccaggtatgaggaatgccaatttgaggtttgtggtcacaaatttacttatttatttttattttgttattattattttttgagacagagtctcgctcttgttgcccaggctggagagcagtggcacaatctcagctcactgcagcctctgcctcccgggtttaagagattcccctgtctcagcctcctcagtagctgggattacagacgtctgctaccatgcccagctaatttttgtatttttagtagaaacggggtttctccatgttggtcaggctggtcttgaactcctgacctcaggtgatccgccctccttggcctcccaaagtgctggaattacaggcgtgagccgtgcacctggctggatcatgaatttaaagagcaacccgtcaacagtgctgtgcgcttttctccagcacctgcagctgctctggcaccggcctgaagaaggtgagggttaggttttggaagagttgggacttagccaggtttacgtgatggacagagaggggcaggtttattgagggtttcagccggggagtgacagtcatggtggagcgtgggatctactcggggttagaagggaagcaagcacatgagtgggtgacagtgaaaaaggtgatactgaaagaggattggaggctctgatgaagcatggcatggagggggagctagagcctgtgataactgagttgaagtgattgggagaagactgcaagaaacagcaagtgagggagcacagggtgtaccctgatggtatcagctgggcaagggttttgaaagcagaggaggagaaatggctcagaaagtaactgaatgaaaagagggcacccacatcccctcctggccttcccaggacgtttctccctacgtctcccagagcagttctgtctcttgccaggttgcctgaaaaagcccacaacaacttgggtggcttcagttttaggccaaatcaggccatttttcaactttgtttctccttacagcctgatccacagcctggttctgactgcactgcacaggtggtagtaatgtgtcttctaggacgggcacacgggagtcagatctctagacagaaggcctggtttcttctcctgtaaactgcattccctccctcatttgtttattcaaacatgtgttaagcactactgcatgccagtcctatttgctttattttctttacctctctcagccaccctgaggggagggattattttttatttattttcatttttattttgtagagacagggtctcaccatgttgtccagcgttgtctcgaactcctgggctcaagtaatggggggaggattattacgctcatttttacaaatgaggaaataaaactcagagagctgaaaaatttgccaaggtcatattgggtctatctgagtccaaggagactcactatccagatagggaaagaatcaggtagggaaataataaaacataagtcgttgtgcaaagttttaagggaacatggaagttagagagattactcctgttatgggagaagaggtggggtgcatgtgagttagacttccaggattagtagaaatttacatatggagctggagaggaaggactgcaggcagaagtgatagcctgagcaaagacatcatgacatgaaactccatggtgtgaccaagattgttgagttaaaggcagagacaagattgtctataggcctggggttcatgaacagcctcaaggagatggtccacaaacccccagacatttgatctcagttgtgggtgtctttttttttttttctagagagaggctttttattttcatcgattcttcaaaccgggacattcactcaaaacagccttgggtagcagataagcttggagacatcagcagggcccgggaacacaggaccttgtagccctggttcaagaattcatacttcactctgaggccaacaaggaacccatggtgttttctagctgggagaaagcacccaccttaagcaccctttctagccttaggaagacaacacagtttactgtgagctgaaatagatggaaagttcttctataaactagaacacaatctactgtttactgccgtatccctagagttgggcacagtgctgagcacatattgggggttcagtagatatttgttgaatgaatgaatgaatgtgcacaggtgtacatcataacaataaaaagaatgtatatctccagggtggctccgtgcatttcttgactgatttaactgaaggtgaaatccacgaaccataaactctagagcttcaggctctaacagaaacctactgagtcctgagatgatgctaggagtggcggggcaggggtgggtaggggagagtgggtttggcacctgagggtgtggttacacctggctgcaggatagggctcttcccaaagtgccctttggcgtctttggaggagtggaggctacacggtcaggatggccggaattcttcttttcctccttcgacattaaatccatctgcttgtcctgttgactctgtctccaaaacatgtcctctatcccctctatttcctccctctcctccactctcacccggttcctgctccccacctggcctgggccaccgcagctgtctcaaaaccagagccatggctgtgcccttgcctccctaccattggctctccatgtggcagcctgagggatctttaaaactctccacctgaaaagaacgtgactttcttagagtaccgtgtttctaaaaatttaatctatttttgggtcatgtgggaattttgctaagatgcagtttgtgattcagttatctggggttgggctcaagactgcgtttctaataagctcccaggccatacagttgctgctgctcctggaccgcattaggagtaacaaaggcttggagaaaaacccaaacttccttcccatgtcccactttatctggcccctgcatagctctcccacatcatctccagcccttgctcctctccctcatcttgctatggcttctctggccttcactttgttcctggagtatgccaagctgctcctacctcagggcctttgcacatgatgttcccactgcctggagtgctcctttcctggaacattccacatggcttgcttttccttatttacatcttagttcaatggtcagataataattctctgtccacttcacctagtgaagtaccttagccaccagagactctcggctatttgctttcttcttcttctgcgtagcacttatgattctcagtttattttggtaatatatttgttgacattcatttcctgtccttcccttcatgtatgttccacagggataaggactcggcttccttcgctttgagcctaccccagagcctggcgcatgctaagtgtcctcttcatgtttcttgggcctgtgcatgaaaatgctcccaccgctgctgttggtgtttggatgcagacaagctcggaaaagcaatgaagggacccgagacagaggagaggaaggagagagtaagcaaactttctctactgaggtgcctcagaaaaagcctcaagaacctggagatgatgctgaaaccctgaatcaacacataatagatcaattcatctaactagaagagattcattctggaaggtgaggaagaaagtaatgcatagttcaatgagttaagcatttggaacagtttcagtagacatacagtaaatatttatcaaataaataaatatgccgaacccttattttatgaccattactttgtgttatataatctgttcatcctcataaaacattatcaccatcttgcaaataagaagctgtgctaccagattaggagatttgcccgaggtcatataagactcgtcaaaggtcatacagcgattcagagacagagctgactaccctactctctaaaacagctctattcgaagttgtaaaggccatattccctgtccccttccctgcagtgccataccacctgttaccactgacacactgtgcatttatctgcttgtctgtttcctctcaccacagcataaattccctaagggtaagaatcttcattttgttcactacccttttccagagcccagaacagggcctgccatgtaagtggcacttcatgaatgcttactgaatgttaaaaggatgaatgaagggattatttaaaaatccttatttcggccaggtgccatggctcatgcctgtaatcctagcacttttgggagagtgaggccaagaacaggagtttgagaccagtctacatgacacagcaagaccctgtccctacaaaaaatttaaaaattagtcagatgcggtggcaggcacctgtagtcccagctactcaggaggctgaggcaggaggatggcttgagcccaggacttttgaggctgcagtgagctttctcgcaccactgcactccaacctgggcaacagagcaaatccctgtctcttaaaaacaaaaaacaaaaacaaaaaagtttctccacctctgaggggcagttctgtaaacttgtggctgacagatgactcaaatccaggcaagaaggctggaggccatctgtgaggaaggaaaactgtggcctgctgaatgctctggataatcagagggaagactgtatccacagaggacagactcgctgcatggaacctggcgggagagtaaccagggagctggcatttgtccagtctcaggctctgacatcacccctgtggtgacatgggtgggcatgaatgccacaagctggcagtggctcttctcaggatgtggcttcccacataaagtggccctagagggagaatgtgatgaccaggtccctgtggcaataacaagtttgatgtaagtgcataaataggcacttaccagaacatttcttgtgagccaggcatggtagttcacgcctataatcccagcacttcaggaggctgaaggggaaggattgcttgagcccgagagtttgagaccagcagcctgggcaacgtagagagactccatttctaaaaaaaaggaaaaaaaaaaaaaagttaacgttagccgggcatggtggcacactcctatagtcccagctacttgggaagctggggtgggaggatcgcctgagtctgggaggtcgaggctgcactgagccatgatcatgctactgtactccagcctgagtgacagagcaagaccctgtttcaaaaaaaaaaaaatcttttgtgaattgtgttagaatgagtgagtcgttcaagcctggcagctctggctgctggacagaggctctgaaccagccaggttgggttgtggatagtcccttgagatagttctctgcccactgaccttcctctgtgcctaggcttctcaaagtatagacttgcgactgggctcagactaaccacatcagtaccacctgagaacctgatagaaatgcagattctcctgccctgtcctctgatctacaaaattagaaactatagaggtgagctccatggttctgggaattaacaagccctccaagtgattctgatgcatgttcaagtttgagaaccacaactagtttccctttcataatagttactactttgcaaggagtcggatggggttaaggtaacaggttgagaaattcataatatcgtgcaggcggtctttttataagttgagtgaggactggatcaatgactctcaatgggaaaggccaggggttagggaggaacctccttgcatttggaaaatctcgaggaggggttaatttgcaaaaacaagttttaaagttatagttttgcttcctagacctgatttttaaaaatttattattttttttagagacagggtcttgtcacattgcccaggctggtctcgaactcctggctttaagtgatccttcccccttggcctctcaaaagtgctggcattacaggcatgagccacggtgcccagcccttaatttatttcgaaggctggtgtaatataaacattaaaggaaggtgtaatacaaactgccatccattattgattgttttagtgtctacaaggtttggatcccacctcctgtccaattctcatcctcaaacacaaaaacaaaaccaaaaaaacaactgtctatctacacacacacacacaccctcggctggcctgagaggtaaaagaaacatcccataggacctgctgaaagagctcctgaggcacgctggagcctttcttgtgtgccatgcactgtatctggcactataaagagggtacaatagctagtggcttctgcaatcaagcagcttacaagagaaaattgagaggggagacattttttctggttgacagatgtcgaaagcatgaaggtgtgggagctttgatcagagacttggtttttcagttttgccagataatagaacgcatggggtgaactaatgggagaggagggtgaacagatgggcaaggcttgattgctgggttaggaggcacagaaatgcacagaggacaaaggactaccagtccttggcagtactgtactgctccatggccactacctgggtccagggccacattcagatctgaggttagatagtaagaattgctaacatttatccagcgaccacatgtgccagtaatcaatctaggtgctgtacatgtattaactgattcttcataggaaccctattaaagagttatttgatgaggagagtcgggcattcactggaaatcgaacgtgcccaaagtctcaccctagaccgtggtggagtcagaatttgaatcctggccacttgctccgaagccaccgacaattcagtgtgctgtcccccgtgtctgggctggcttggtgggctgggaatggcgggggaatgggacacttattttggcaggtaaatgtggttcagaagaaagctcttcgtctttctccaagcctgagcaatcgttttggcgcaggcagtccagagtagagcgctttgtgagccagctacagaagtgctgtaagccccttcccactagatggcagcccctaaacccacatacaaatcctggaacctccctggtccccatcttccagggctgggctgcagctgaggaactgcgggacgcacacccgccgggcgtccagggggcgccgccccatccgggggtcgcgggaagctcctaggccgggtgggggacggaggcggacggggagacgctgctcccccgactctcggcgcctgggggaggagctggcgcggagcagctccacccggggctcccggttggggccggccctcaccgcctgcctcgccgcggccgccgggaggggaggggagaggagggcagggagggcggcgcgggcgcggtccggggccccgagggcggaggccggcggcaggtgcgcggcgtggactacaagtcccagcatgcccggccgccctgacccagcccccgccgccgcttaaaggctccgggagccgcagccgtcgggtcgccgcggctttcgctttgctgccgcggctgggagggtggaagcggcagactcagcggccggctctaccggcgtcccggctcgggcagcgccgaggggcgctcctggtccagctctcctggctcgggggttccttgccgaggcgcccgcgccccgggctcccagcctcggccgccgcggccccgatgccgaggcatggatagagcagcgctgcgcgcggcggcgatgggagagaagaaggagggcggtggcgggggggatgcggcggccgcggagggaggcgcaggggccgcggccagccgggcgctgcagcagtgcgggcagctccagaagctcatcgacatctccatcggcagcctgcgcgggctgcgcaccaagtgcgctgtgtccaacgacctcacccagcaggagatacggaccctggaggtaagtgggtcggggaccaggctgggctcgaggagcgggcccggacacctccctccgggccccagtactcctggccgagttgcatccttgagcccgcgtcgccccccttggaggcttcccctccctcctgcactcgctgatgcggcagccggaggacccgggaccagccctcatcttgggcaggatttgtggggcgggtgcgtcgtgggaactgggatggaggctcgaggggcccgtgcggggtgggctgcgcgcggacatcccctttccccccttctccgcccccaccccatttccagtttgcggggccgcaggactcgttgtcccaccgagtcacaagctggacttttccccgtgtgactgagccgagcacccgtgggccagggtgacggaggaggttcccctgaagcgtgatcgcaggcctgccgtcccctgttcccctcacgccccagacgccgtcctgtcccttcctttcctctcctctcaggtcttgtctgccgccttttcaaaaagtgttgctgaaactgcatttttgttattcaggcgtttggtgctttcctttcacgttgccacggaggctcgctgcttaaaatgtattaataattacccgctgactccccctgcttccccccaaagattggatttaggcttaggaaggattatgctgggaagcaagcctttggtgggaagatgaaactgtttaaagggttctgatggagacagtctggagtgtaaagaagaaataagatatgcgggccttcctctctcaaattatagctggggaagtatctgaaggatttggaaaaaccagcccgagggttgttggggcaccctgtccatacacaaatgagggcaactagtggattctgaatgtgattttggccagggacggggcggtgaaacgtcagaccagttaatagctgccccgtcttgaagaaggaacctctcaccatcttgccctgccacatctggcctcctgcaggtctggggatgttttgttttattagatcctcaatttctcctcccccaaaccctccccccgccccttattgctaattgcctctgccagctgtcataaggccctctgtgatcgcggtaattattacaagaccaatccttcctccaggcatgccacaaagccgaatccttgtttgattccaaatgctcgggggtgactctccctcagttttattttcttaaaagctataaaaccacaggacattggaagaatacagtcagtgctgggtattattattttttattacagttggctaaagctgtactgaccaaggctttgcttaaaaaacaaacaaaaccccctacaactggcctttctgcatgcatgctgcagttttccaagtattgagagaaactgattttttgaacacagctgagtgtgtttgctcagcaaagttcagtttttaagctgacaacaatagggggcctgtgaggctcagttccgggaggaggggtcgctgtctggcagagtgtgcgtggttggacttcggtgttgctgggcttggagaatgctctctgtgttggcctctgtgggattgtccccacgttgctctgaagtgctcctggcttccagagtgtgtatataggagaaccacttgctgtgcattctctggaatggccttttgtcctaccctaacttccggagtccctcattttgatggcagtgtggcgttcatgacaccccagagcatccagctatttaagtgttggagctggtttattcagtggcttccctcctgagtgtttgtttagacgatcatccctggcagcagagaacccatccaaaggcccacaggggatctgcagctccctgttcttcccaccgtgatgtggattcgggttcactccacttcctgaaaaggcagggcctgggttgttttgggggatgggaatttagacccctggagtgagttccatggggctgccaccagctagtttagatgagtcacttcatcccggaggcctcagcctcctcacctgcaaaacaaggaggctggagtggatctctgagggctctggaagctcgaaattctctaggttagagaaggagacttggttgggtgaaatcaaatgtttgtgattgtttttatactaccctggtttaagaataaccctctttaagaatggttctaaaatccagatttactgaacccataacataggggttaagtttattagaagaatctttgccataggagcagcgtggtgaataggaagccccatggctttcatactgggcctgggttctgtctgtgtgaccttaggcaagtcccatgacttctgaatctcaagctctcctgtctgtaaaataggaacgagactgctcacacctgcagcattttgtctgtcagtccgtgctgatactacgaaaagagtctgcctggcagctgcccctagtgagggtccagtagcatttatggcacaggccaccactagggaaacttaacccctactggacccttgctagggaaacttaaccccctactttatgggttcagtaaatctggattttagggaaaggtacttctgcagctgcctctcatttcatacaggtgggtgacacaagccaggaaacaatctcagcaagctgggtgggaccgtccaccgccagcagcatgtgttggggccaggcaggcaagtggcagtgtccactccagcgttctttcctgttctgtgggctccccacacaccaggccgtggccccagagactgtgcttgcaacactggattcctggcttttgaagaaggatctgacctggagggcttggcctgtgcaactgcatcggacttatctagaatctgaggagccccagctcactctggccttcattaaataaacactcagtgggagaagcagcacgtgaaatgtccgtggaggtccctgaccagggatgggctgctgctgcctgaaattgggttgtgatggggtgtagtgggtcagcgtgtctggttgtccggggatagcttttctctgtgtggtggtccagtttggatggaaaagggtagaaggagctgagacttaacgtttgctgcctgtgtgcctagcagcgtgcctgactcttctcaaactcacacacgttcctggagatcagcagttttcatcatacacattttccctctctaaatataaagggagggaggcacaatttgaaaccagggtattaatctgtaaacagaagttgtgaggctacttcatcctggcaggagctggtgttctgtctccgctagaccctcctaggggtctgaaaactccaccgaggcaaacgggaatgttcttatgccccagtgtactcacagagggacacttggcctgcctaatagctgggcctgcaacctatgccagtaataattaccttcattcctttgaatctgcccagcgctggggagacaagggtgtgtagaagcagacacatgttgcctcatggagatttatgttccagggacattgtgacttgccctttcctgccagcctactagtactttccagagacaggctctgccatgctgagtctccccaccttgtgttcttgtggagaaaaatccctcctaagcaagctggcgtggagaaaggggctgaaggactttgaccatcaggctttgctgggggaggtgatgttggcaactgtggtaggtgcagagtcaggctgtgctgggaggcgatgttgggaactgtggtaggtacagtctctgcccttgggctgctttcctgagcagttgccctggagccgcagggggtcagaggggaggccctcctgccatctggaaggtcagagaggcctggccctcacacagctctgccgtggcagaggtcagagtcccaccgtgtgggggacctgagctctccctatgcctcccaggagcatctgatgatggaactgctgggagaggggaggggtggcattcctgcagattgggtccttagggtgtgttgaggcacgttccctggacagacctttagttactgttgatgtgcttacctggctggcagccacctagcaagggctctgaagtaggtgggctgttctcccagtctttggggtctagggacagttctagtctagtgaaggagccaggcagggcacagtaatgactttagtagcacagcttgcaggaccctgcattgggaaccccactgaacccttggcccatccaacctcctggtttttttgttttgttttgttttttgtttttgtttttgtttttcttttagtcagagtcccactctgtcgcccaggctggagtacagtggcatgatctcggatcactgcaatctcagcctcccaggttcaagcaattctcctgccttagcttctgagtagctgggattacaggcatgccccactatgtccagctaattttcgtgtttttagtagagatagggttttgccgtgttggccaggctggtctcgaactcctggcctcaagtgatctacccaccttggcctcccaaagtgctgggattacaagtgtgagccacctcctggttttctgggaaatattcccagagtcttggggacttctcccaagtcacaggtccctggcagaactgagactgaaacctggttttgctttcccacccagccactgtctcaaagtgtggcgtttctctgcttctgctctgtggccacagttgtaaccctctggccaagtggctccagccgtctctgaagagatacagagctggggctctggcccttttttgtgtccactttcacccgggtaactttttccctggtgaaacctacctcccaaatgtttcttagaggcagcctggagggagacccgcagtggctgtgagcctggggagggctgggtggtgctggagagaggtcttatcagatctggaggtgtggtttgctgcctgcagctatgggaatgccttcttccacgtcagggttgtttcctcttcttggagtggtctgggctgcctcaaaatccaggaaagtgcgccgcaggtattctactcctgcccgctgggtgtgtctggagatggaccatgcggagacgctggcccacggtggcagtgtctgcaatgccggggagaagcagcaaagcctgtggccaagtctctctaagctatgcctttttaaaaggccatcctttcagaagaggctggttgagatctcttttttatgtttaattcaaagggaaagctgcataggtgcctttggggttaggggaatgatcttggagtagagagggcagacacagatgaagaacgtgcttgatcacctgttctatgttgagcactccactaggctctcggcatatgttgcaccttaacattcacaatgatgctatgaggccttatcctgatgttgcagatgagggaattgcagctcagagggatggagagactgtcttagcaggtggttgaacccaggttgactggtcttgagaacttatgttcagaactccacagctgttgctgtggcggggagattctgtgcagggccatggttgctgagaccaaggaaatggccaataataaaaagggctgggccgagggcattccgtggctcaactctagatgtttgggcttcctggtggccacccaggctgtgcagcctcagggttcgggcatgggtctgcttccctaatgtccaggctagcacatcctcaaagacaggactctcagcaccatgatgcagcccgctctacgcttgtctcattctgagaaaggagaagctgcctagagatcagtttactcataattttttaaatggctacctgtcttattctttctgaacagttcctctgataaacagtgtattctttaactttctacttttaattaaaatatttacaaaatacataatgatatatgttcactataaaaaagaaagtactagatgtacaacagtgaaaatcacccataatgccacctctcagagttaattccagtgcacattttgttgtatattcttcctgcatttgcatataaatgtacatgtgtatatttgtggcacataccatgtgcattgccttgtaaatgtcttctgtctgtatcagcacatatacatatgcatcagcactattagtggctgcattgtgtggtcataccacaaattcatctaaccggtttccctgtgtgggccattcaggctgtttccaagtcttgcttttataaatggtgctgcaacgagtatcttcctacaagtgagatttgctgggtcaaagtatatgaatacatttaatatctgtcctcgtctttaatatctttatggcatcataactccccctctcctaagcaggaatggcagccttcatacatttatccatttgccactgcatctgtaatcacactgacggccaagagtttaaaaggaggctgggcctgggtgcggtggctcatgcctgtaatcccagcaccttgagaggctgaggctggtggatagcttgagtctaggagttcgaaaccagcctgggcaacatggtaaaccccgtctctacaagaaatagaaaattagccatgcatggtggcacgctcctgtagttctagctactcaggaggctgaggtggaggttgcagtgacctgagattgcatcattgcactccagcctggatgacagagaaaaaaaaaaaaaaaaagaggctggacatggtcctctggctgagattctgggataagtgtcaggaactatggcttctagttttgtggttgcttgtgtctgaggttctgggctatgtgtcaggcattgtggcttctagtttttgtggttacctgcagcaaaggggggccccctgggctgaccaattagaagaaggccttttccttgctccaagatagcggagggaggggctggatttcaggtctccctgtccagagactgatcagctttggtagtacataatcatatggtgaggtcttgatcacttgaggctcatgaaagtcactttaactgcattcttggttgcatccctaactacaaatactgatcacagtgctatttggggtgcctggctttggggatgatttagtagagttgtgggttcctagggctacaaagggtcttggaatttccatgtggtccagccctctcatcttgcaggtgaggaaactgaaggcctgagggagaactgacttgccaggaacccctgttaagcagaattaacaaagggtggttattaaaggagcactgagttgggagtcagacctggaggcccacacccttgattaagacattataccaccttgagtctggcctgttgactgagggtgagccactccatcctcctctgattgtggggtgttgacctcaaggggtttcctgcaggaagaagcaaatgggtttgctttcctagctctgtcccagtgccttaggggccctgaggactggagagattcttggagcgccatctggggtatgtcacgggtggaccttttttgaaggtcagtctgctcagtgggctggctcagcccgaatgaactgtcttgaatctttggagttgtctgtttacttttaagggcttctcatccttgcaccaaaagatcccctggaaattaggtgggaaatccttaacttttatggggccttgtgtttgtcttaaaagttcatgcgcatggccaggtgtggtggctcacacctgtaatcctatcctggatcccttgagtcaaggagtttgagaccaatgtgaacaacatagtgagaccctgtctctacaaaaaataaaatattagccaggggtggttgtgcacacctgttgtcccagctactacagtggctgaggctggaggagcacttgagcctgcactgagctgtgatctcaccagtgtactccagcctgggccacagagcaagaacttgactcaaaaaaaaaaaaaaccagcaagaaaaatccttgcagattttgcattctgtgccactatccattggttttcatgtcaagataatgtaaaaattctttacaattgcttccagaaggagtagccttttaatctagtgcacaggtgtccagtcttttggcttctcagggccacattggaagaagaatgctcctgggccacagataaaatacactaatgctaacaatagctgatgagcttaaaaaaaaaaaaaaaggtttgtgcataattttcatgatacccaccaccacagataggcggaaaagtccttgtagtcaaagggttggacacggctgatctagtgtcttgtccgttttggctttctccctgattccagaatgcaggtagagatgtagagacgtgctctcaggacagctgttgagataaaaaaatttgttgtcatttattcccaggcacagctgtttgtcatttgcattgaaaaagtctccattcaaactgctgtcacatataaaatctatttatgtaagtctgtatttttctgttgtcttggccttggtgggcagtagtgtgttttaactgagcaaactgtctttccaaataatgaagctgaagtcagcctacctgcttgccatttttcttccccttccatttttctaatctccggataattgtaagaatgaattaagatttgtgtttaaggccgggcacagtgtcttaggcctataatcccagcactttgggaggcagagacggacgtatcgcttgagctcaggagttccagaccagcctgggcgacatactgagactctgtcttgtataattaaattaaaatttaaaaaaagaagagataaagacccgtgtttaaaatttttaaaaaaggggggaaagtgtaatgcaaaatgtggactatgccagctatgattgggaaaaataatttttcatacagcattatctatagatttgtattagcagcatactggtcataagcgttttgctttccgcaaatatgatgtggtaagctactttaaagtgtggtggggctttcttccgcatggctccttgaggggttgagtcccaatttatccaattaatttgggtttagttttgatatggataagggagaccagcttcattcatggtgcacacacagttttgccaataaggaaaaaaaaaagccacctgaatgttcctactcattaggagctatctggagagctcctaccccactcccaccaaggcctgggcccttaaaaaggctcagtgcagcctttctgtatctcactgtattctgcaagatgctcctgtgaagaaagttgtgctgcatcagccatctccctcctgaagatccctgcggatgaggatttgtgttttaaaggttctgagaagtactgcaacaacagttctcaaacttatttgtccaggggatcttttcttccactgaacgtagttggggagacatggccttaagccttgagcagagaaagagacaagaaactgttggctcacttacaaccaagtgttgtgtttaagttttaggtttttatgaaactgaggtgctgtttgagtttccaaataaaattgggtggttgaagagaggctggtatccctgtagacttatccagccatgagaaattgccttttttacaaagggaaatagggtgtctcctgggcatcacattagcacttaaatacatgtatcactgaatccttctaacaagaagaggaaacttgccgagagaggtgtgcccgcctgcctgcctgcctgcctggagtttgcacttcctgcctcctcctggccctgggtgcatttagttggtgttaagggcatggtctgctcagtgtctaccaggaacctcatgatccccctgatgggcagaaaacaatccaagagaaatgcagatggctgtgggtgcatttgagcttgggctgcagggggtttgggggagagggctgggctacagatgaagaatgcttttcaaaataaaaaaggaaatgctggctctgaatggaaaggaaaggaagcagcttcctgtttctcgtggtggctttttgaaaggaggagctctttctggcctcttggccaacggaggcctgggccggctggggccactctaggtgcgctggagtcgaggctcccacactgctgcctgaggtttcagaaagagcgctggttccaccccgtttcattttccccggtcgctgagtcaaatggatgcatgtggtttccaaaacgaatatctgtacctgttacaaaatggatgtgtcataatgggtgacatttacttttacggcaagcttgctttgtgcctggcccccttgttaagctttatgtagcatttacttttcacaacacccttgtgaggaaggtcttctcgctgtccccattttacagatgaagaaactgaggcacagaggggttaagtgactttcccagagtcacatagctaaggagagactgagctgtgacttgaacccaggcagtcttaattccttgcctttatgacccagcttggatttgcaaactcctctctccgtccagctggaaaatctgttagcataggataattttgaagactctggttgcctttgtctaggctctggggggtagccccaaaccctgggccaggccatagtgattccttggtgtgtagcgggcaagggagaaacttactttttgccctctgaaggtttactgaaaaattaactcacaacatatagatgactaagagaaatggcatataaattgattctccctggtgtatcacagaatcacagagcgattacttaatatcccagtgggacccaaatatttctttgaatgttcctaagagatagacattatcttgtgaatgggtctcttagggtgtggttgcgtttttggtcttttttcctgcaatagataatgagataacagtgaggggaagaaaaaacaatccttggtccgtggtgggtccatctggtcattttatagacaggggaaatgtctctttcagtgtctgttaatctctaagggcctttagtttaaaatgctcattatatcagagagctatgttttgaggtcaagttccctgtgctccatcaggtgaaatgcctaggtctgagtttatgttttgtttttttttttttttgagacggagtctcgctctgtcccccaggctgtagttccgtggcgcaatcgtggctcactgcaagctctgcctcctgggttccattccattctcctgccacagcctcccgagtagctgggactacaggtgcctgccattatgcccggctaatttttcgttttcgtatttttagtagagacggggtttcaccgtgttagccaggatggtctcgatctcctgacctcgtgatccgcccgcctcggcctcccaaagtgctgggattacaggcgtgagccactgcgcccggccatattttttttttttaactttatcatggaaaggtttaaacttgtacaaaagtagagagaatgttgtgaccacctctgtgtagtgattacccagcttcagcaataaccagctgtggccaattatttttttttttttctgagatggagcctggctgtgttgcccaggctggagtgcagtgatgagatctcagctcactgcaacctctgcctcccgggctcaaacaattctcctgcctctgcctcccaagtagctgggattacaggcacacaccaccatgcctggctaattttcttatttttagtagagacagggtttcaccatgttggccaggccagcttgtgagctcaagcaatttacccactttggcctcccaaagtgctgggattacaggcgtgagccaccgtgcctggcctgtggccaatcttgagtgatctagggtatttatgctctgttttggcgatggtggccctgggcagttcgtctctaggaagcagagtgacccagggcggtcttctccagccatccgcttccaggctgagctgtacctatctcagcaggctgggaggaatctctgtgttttcctatgaaaaggcagttttgattattttctcctaagcttgctctggcttctggcagcaggtacattgcagagtgtccatctcactatctaacctgagtcccccgccgcacctgaaacctgttctcagacggctgggtgctttccctgtcccacagcagtcctgccagagactgagatgagagtttttaacgaagcagggcccccagacccagcggaatcccactgtgcacatcctgatttccagtccattcttgcccatgcctctagtgtctcttcccttccttttccttgttgcttgttcccattatgagataagtgtatttcagctaacattgattaagcttcactgtgtgtgggccctggagagaagagctgctgagtacaggaaggtgctattctctgggagccccgggcaaaccctcatttctgcggttccagcctggaacccggatccagcacctgtaaaagtcttccttgcccttcccggctcttctctcgaggctctgcacagtccttcctgaagcctagctttgttgaccactttctcatttcttttctccgtggtcttttgatcccaacaggtagttttcttttggttgtttgtgctttattttggcttttgctgtattctcttgcaagcatttctcaggtgccgagtcactttttgctggctgtttcagtctctgagtttggcctccacaacacaatcgtgatgtcactatgggaaagagcccctcaagcacttggtaggacattgaggcgtgcattgagggcgccaggatgtgcggggactctggggtgaggatgacatattcgtattctgactccattccttgccagctctgtgaccttgggcaagttctttagctctctggacctcagttttcttgttagttaaaaggggataagagtaggttaattttggattcttttgagaaccaagatacagaaggagtgctggacagtgcctggtacttagaaggagttcagtgtttcccccactgtcccccgcctttcacgtagcattactccaaaacacttttccatgtttccctattatcttccttttggtcattttagttgccacatgagagtgtgtctagtggatctgctgtaatttggcaaagcattttccgtgttattggacatttcagtagtttctagatttctgcaattataaacaatgtgaatggaatcgtctttatataggcgctttatttttgttcctattctgaatttgttttcttgggataattcccaggaatggaattactggatcaaagagcatggagatggagtgtgtgtgtgtgtgtgtgtgtgtgtgtgtgtgtgtgtgtgttaagacttgccaaactgttctcccatttttttttttttgaggcggagtatcgctctgttgcccagactagagtgcagtggtgtgatctcagttcactgcagcctgcaccttccagattcaagtgatccttctgtctcaccctcctgagtagctgggattacaggtgcacaccaccatgcccagctaagttttgtttttgtttgtgtttttttttttttttttttgagacagactctcgctctgtggcccaggctggagtgcagtggtgcgatctcggctcactgcaacctctgcttcccgggttcaagcaattctcctgcctcagcctcctgagtagctgggattacacgtgcccgccaccacgcccagctaatttttatatttttagtagagacagggtttcaccatgttggtcaggctgatctcaaacccctgacctcgtgatccacccacctcggcctcccaaagtgctgggattacaggtgtgagccactgcgccaggcctaagttttgtatttttagtagagacagggtttcaccatattggccaggctgatctcaaattcctgacctcaggtgatctgcccaccacagcctcccaaagtactgggagtacaggcgtgagccaccacacctagcccctccatttaactcctgttgaatgatagctgttttaaaaattgtactcctgggtaagtatctcatattttttacaattctttctgacctttgtacctttcttcttctctcctttattctccccattttttgaccttgttagatattccttatcttgaatttgctatttctctcttctgtgcattcattcagtgacttttttttttttaaatttcagacagagactcaccctgtcccccaggctggagtgcagtggcacaatcttgggtcactgcaacctctgcctcccgggttcaagcgattcttgtgcctcagcctcctgagtagctgggagcacaggcacgcacactacacccagctaattattgtacttttagtaaagacaggttttgccatgttggccaggctggtctcaaactcctggcctcaagtgatctccctaccttggcctcccaaagtgctgtaaaggcgtgagccaccgtgccgggcccactccagtgacgatttattgagcatctgctcaatatcaggtttgttttaggcactgttttaggcactgaggaaggagcaaggaagaaaatagagggcttccttcagtggaaagagaaagataatacacatgccaaacagacagacgtgctctcagaagaaaactggaagtgggttagagagaggtgggggtatggaagaggtgacttctttagatggggtgatcgggaaaggccttcccagagagggtgacttttgagctgagtcttgaaagatgagaaggccactgtagcctggaggagtgttcccggcagagggactggcttgtgcaagagccctgaggcagaatcgagcttggtgtggtcaagggccaggaggaggctggtgtgcctggaacacagtgtcaggggaggatggttggccttggggtcaaggaggtaagcaggggcatggggctgttttttcagtgctgggccgcaggagagaattaatgcaccaactcagcaaacaggtgtcctcctacttccccctccgccctcctggccgggtttcgtgccaggcactgttctggaatataagagtgaatgagagatgtattgtgctccagaaagccagcttagtgggggagtttgtggatgagtaaactcatagaaggtgctggtgaggtgtgaatgaaggctcatcaggccgcgcagctgactcatctctgtactgaggtgtgtagggacttgggaaatgtgtcttgatttgcacggaactgtgctctgtgctgtcagccttcaccgtggtaactgaaactcagttctctgatgtaaagcctggcagtcccggcctgcttgggggcacctggacccctgccagggaaggggtcctcagacttgaggttgccagctcagatgtggggctgctgatactaggtatgagtgtctaggctcccagttatgggaaacaagaccaagagacagccatgggaaacccccttcttactgagctgcctgccctgaccctttctcccctgactgcggactctgatttgtggctctggttgggaatgtagatttggggacattgtgctcctcatgggtttcttcccgtaggatggggcaaagaaggggttatgagattgagcagatgcttctgggagtctagagtgtactcacatagcgaggtgtggacctcatgagagtgcctggaaatagcctggtggaagatgttggcaccatttcgtttggaggaggctgaatgactcataagccccggggggctctgatgtcattgaattaggggcctcctttgaccagggttaaccagcaccttgggttccttgcatgtaagcttgttgctattaaataaatgggaagtgggctgggccccgtggctcatgcctgtaatcccagcactttgggaggccgaggtgggccgattacctgaggtcaggtgaccagcctggccaacatggtcaaaccccgtctctactaaaagtacaaaaattagccgggcatggcggtgggtgcctgtaatcccagctactcaggaggctgaggcaggagaattgcttgaacctgggagacggaggttgcagtgagctgagatcatgtcactgcactctagcctaggcaacagagcgagactccatctcaaaatgaaaataaaaaaaaaatggaatggaaggccagaatcctgggaatgtatcagtaataactcagggccctatcccttcctcccacagttatggctaatgtgaagtggacctgcccaggttttttgagacagggtctcgcagtgtttcctaggctggagttccatggcaccatcatggctcactgcagcctctgtctacctctctggctcaccttcagcctcccagatagctgggaccacaggtgtatgccaccatgcccagctagtacccaggtttaaggcagcaagattctgacagcagttctctcagttaatttctcagtaatgataactttatgagcccatgtaggtgatgaaataaggcccaaagtcacacagtaactggtggagctgaattgtctgaatttccatttgtgttcatttcattgccctctttagaaatttgcttgatcttgggtcttgttcagggcagaaagagataatacaaggctttggtgatgcttagcattttagaagaagtaatgctgggtggaaatggatttggcagtctcgtttttcgcatcattggaatgggagtccctcacagttggagacaggatgaagtaacagagcgtggggatctggattaacaggtggccattcgcagaaaggaggctgcaaagcaagaggtgggggcttctggctgagcaggaaggtgggagaggggcatccttgtgaggagcagcctgtagggctggggtttgggcagcaggcaggcagaggactttatctgatcacctcaaataattttgcctctgcttggaagggttctagctacaaaggcaacatagcaggtagtgcttgggtgtgatggtgataggcacagcggtattttaaatactggtggtacattttaggagaaagaaggtgacgagtccctggggagagtccctgtggtggccatgactcaccgtggcacaggggacagaacagaacaaggaagaatccatcaacgaatggaaacttgtctttttaggggacaggaagctttttttgtgtggttggcctggtggcttatgaggagaggtgaacatttgagacaaaaccccaggccactcttccagctgcatctttgacaattttgagagttttaggaagtagttaaaaaaagaaaaagagaaaccaaaagccaaagacctcgtttactcacaatacctgtgtacagccagccatgtgggctgcgatcggccatgtgtctagaggaaactccttcacttgcatccctccctcctagacccctaaaccagagggggcttttgactattcttagaagaagacttaggcggcctcaaatgaccagaccttgtctcaagcatctaacagcttaggccaaacttcctctctggccctgtttggtttaagcagtttcctggtctggcaggatttgttatcttagcacccagcttgtcaaagccgtagtgctacttgttatagcaaacaggcccctgtcaccctgtggctgcaagccaggcaatgcttatgttccaaaagtcagacctgctgttcttactataaagctctgctggaccatgggtggcttctatctttggatgtaaggatgggaggatgagcagcacctcatgctgtgtaagagcacaggttctggtggttgacagcctggattcaggctgcactgcctttctggctagctgtgtgtctttgggcaagttgcttaccctttctgagcaatagtttcctcatctgtgaaatggggattataatggggtcgtttttcatagtaagtaagatgagccatggaaaagcacaatgccttgtgcagaatgagaatatttttatattataatattactatttattttatcgacaagtgtttaattagcacccattagggactgggcactattcttagctctggggaaaatagcagtgaacaaaatggacacaaatgtagaccttgtggaacttacgcttcagtgttgggaggagacattcagatgacaagtaaatatcacctggaatcccagttacttgggaggctggggcagaaggatcacctgagccagagttcaagaccagcctgggcaacatagcaagattcccatccctaaaaataccacacacacactaaggaaaatgtgttatctgttaagtggtaaaagtgctgtggagaaaatgaaagcagggaggggtgcctagatggtggtataatttaaagtgaggggtcaggatgggtttgcagaggaggtgatatttgagtaaagacctcaaaagggtagagaagggctccatggggatacagctggaaaagagctttggaagctgagctcatgtggaagccaaaggggagtgaaccagggttgttggaaaaccctggggccaggggtgaggccacaaggggccctgggcatgacatttagggaggtgcttgctttccagtacccactgcactcacgggtctctgagcacaggtgtgaaggagggaagagtaatgagaagagaaggtggtgagaggtgctgtgtttatgtgggctctgcctccatcctgtaggatccacaggtgattttgaaacttatgtcttactaaaaaatggagttttggggctggcacactaacctactgacttacagaaagtcactttctgactgcgtgggcaggtgacagagcgctggcccggggcaggctgaggctctgccactcactgagggcgtcaggtgggtgagccatgtttattcatccagcagcttttacagagctcccacggcaggagatcatgctggcacctgcccggtattactctcttcatctatgacacggggacagcgatgcccttccgtccaccccatccttacaggggtgttcctcctgaggcaagaatgcaatagaaaagcaaaacagaatgtatgaggctatttgcattatccataatacagaaaaaaatgaaaataaggtagctgtccagtggtaaggggaggtttggcagaccatggcacagcatgcgatgggtgggtcatcacacacacagatgtcagtgacagaggctgggtaagaacatgagcatattcatactgttacatcgaggaaaaatacacagtatttaagattgcatgtatgtggcatttgtagtcctgtaaatatgtgatgatatgtatgcatatggggaaaactagaggtgaaattgaaatgagttatttgtggtgggactgtttttcttttgcaaaaattcctttattattgctataattgcattccttcatttattaaagtaatgaatatttgagcacctcctagctatcaggctctgagaaggtgcttgggtagagcagtggactggactgcacggctcctgccccggggggaccatgctcagtgagcgattcttgagcccccaccccttctcagcgctcaaggattgaaggctaatgaagtggtgcaaaattcaaactttctggaataaaacggagagttggtcctccaggttctctgcagggcgcttgttgagccagtcccagattctgctgagaaacagggaagtttccagagttgccaccccctcctgagggtagagaactcaggggtagagctggcttggcaccaaaagggctccctgagtcttggctgctgggacttgagcagtgctggggcgctgccggtgagctgtgatcccatcttctcagggagcgcccctgcctgtttgactgtggtgccgttggtatgagaggttgccccaggaaggagaccgcagctgtgggctcatctcctgggtgcccaacactcacagggtccacattgcccgtgatgtgccctgggaagcccatggttgactcagaaggactgaaatgttagacagccacagatggtcccactgcccccactctgagaaaagccctctggctgtttggatgagggtggtggcgatgaggacatttgtaactgcagcacacatgtaaggcctgctgtctatgttctgggctctcagatagcactgggaatactgtaccccaccagtcccctccatgacaggaaaggggtcccgatccagaccccaggacagggttcttggatctcatgcaagaaagaattcagggcaagtccatagagtaaagtgaaagcaagtttattaggaatgtaaaggaataaaagactggatgctccacagacagagcagccctgagggctgctggttgcccatttttatggttatttcttggtgatatgctaaataaagggtagattattcatgcctcaccttttcagaccatacagggtaacttcttgacattgccatggtatatgtaaagtgtcatggcgctggtgggagtgtagcagtgagaacaaccagaggtcactcttgtggccattttggttttggtgggttttagctggcttctttgctgcaacctgttttatcagcaaggtcgttatgacctgtgttttgtgctgacctcctgtctcatcctgtgacttaaagtgcctaaccatctgggaatgcagcctgttagctctcagccttatttaacccagctcctgtttaagacggagttgctctggttcacatgcctctgacacctctagctgccctggaaacaccagagtttcgttcttacctcctattatacagggaactgaagcccagagaggtgagttagactcttgagggcacaccagtggtgacaggctgagattagaattgtagtctggctgatgaccaagcccatacctttgcagtttctttgtcacagctcactggactgtggggtggtacaagttaaaaatctgtctacatagggaaaacggtgatgtatagacccctgtctgcctcctgctccacttccggcccatccctcccagaatgccatcatagcccctccacttctacgccagatgcttcaggggaagttccctgttctcttcttttttttttttttgagacagggtctcactctgtcacccaggctggagtgcagtagtgcaataacagctcactgctgcctcgatttcctaggctcaagcaatcctcctgcctcagccttttgagtagctgggactatagatatgcgccactacacatagctaattcttttattttttgtaaagatgaggtctcactatgttgcccaggctggtcttgaactcctggtctcaagtgaggccaaggcaggccttggcctcccaaagtgctgggattacaaggcgtgaggcaccacacctggccttcctgttgtctttgagggagactaaagccctctagcttcaaaggaaggagttcttctttctttaaggacagactatgtcatgacctttttacccagaaattccagggcttagcccagtacttggcacacagtaagtgctgaggaattgaacgagggttctggagtatgtgctttaatcagggctaaactaacctcacagcattcctaggaaaataacacaaaccggtataaaaggggatggtgtcagggttaggagtgtggcctctggggtcagacagcctgagtgtgactgcgcctgtgctgtggacccttcttaccttggtcaagttattttgcttttctgggttccagtttcctcatctgaggaatggggacatacgaatggggacaatgtcatacctactgtttggggctgttatgcggattatttattgttttttgcatgacgtcaccacattggtcatgagatgttgtgaggattaaatgaatatggtaggtggagtagggctttgtgcccagtaagcgcttgataaacatgagctgtccattattgttctctggggagaatcctgtgcccccaggtgtgggttcccatcctgtctgtggcttcagagtccagacctaatgccaccgacctccttgcccttcctgcacccctaccatggatcaccattggaggagtggggttgggggcttatcaccccaggaagattagataaattgggaagtggggaagtcttgggcagactcaagacccctgagtcccagctttgtcatgctgtgaccctgggcaggtcccctcctgggaatccatttcctaatctgtgaaataagcacgactgttgctggtgtcacgagaacatggtcagtgccataaagcatgtggcgggtggacttccatccatgctcctcccttcatccatgctcctccctccattcatgctcctccctccttccatgctcctccctacgtccatgctcctctctccctctgtgctcttccctccctccgtgctcctccctccatccatgctcctccctccatctatgctcctccctccctccatgctcttccctccatccatgctcctctctccctctgtgctcctgtctccctgtgtgctcctccctccatccatgctcctccctccatccatgcacttccctccctctatgctcctccctccatccatgctcctccctgcatccatgctcttccctccgtctgtgctcctctctccctccatgcttgtgcatctgtgctctgcccctcctcccccatccatgctcctcccttcatccgtgctcctccctcatcctggagtgccagacccactgccaatcttatgtgagttcacataacccacatcaataaggcgagagcagatgggtggctgggttcccgttctcgctgcagcatcccaggttgcacccctcacctctctttgctcttccttttgttccttctgaggcgggtgtagggaagggaggaaggtgccgctcctagtgcaggtgacagggatgggctgctctgacccacactggccctccacctgctttctttgctcagttgagaccccttcatctccttcaagtgctgcaggacatgagacagacgcttggacttcccttgagagctgggcatcccagacctctgttgcggcctccagggagtgggtaggttctggttggaaggaggaagggcttcaatgggatgtgagcctcaagcacgggagagaattacatccctgggtccagatggttgaaaggggccattcctgagccatctgcagaacaggtgctgtggcatgagaatgactgactaacagaggggtggcggcaccacacagacattagagggtgacctgtgctgcgggggcacctgggttggaccatattctctcgggtgtgtgtgaatgtatgtaggtgtctgcctgtgtgtgggtttgtctgaatgtaaataggaattcttggtgacattcagggaaaagtttaatgataaaggggtcttttaaaatgcaagtcagctcttttgcatcatctgcagagaccattgactctcattccacttggggcaaaagccaaagtcaagtccctagcttctgtccttcaccccattgctcatcctgctccagccccttgggccaccttcctgttctcacatcccctagatgcccccaggcctcctccccttgcctccactcccagagtgaggtcttctctaagcagcccatgtaattgtgaaccctcctgcctcccccacctaacacatactgtggtattactgacttgttcattgcgtgcctcacctccctagaatgaaagctccacagggtaaggatttttctctttcattcactgattttcttttcttttcttttctttttttaaatttttaagacagagtcttgctctgttgcccaggctggagtgcagtggtgcgatcttggctcactgcaacctccacctcccaggttcaagtgattctcctgccttagcctcctgagcagctgggattacaggcatgctccaccatgcccatctgatttttgtatttttagtagaaacagtgtttcttcatgttggccagactggttctcaaactcctgacctcaggcgatccacccgcttcggcctcccacagttgtgagccacagcacctggcctattcactgatgttttatcctcaactcctaaacagagtagatgcttaaataatattcaaatgaatgaaagaaggaacaaagcaagttactaagaaaactgccaaggcctagtgcagtttgacactcagagcccagtaggacccattgagtagttttccgatgttggaaataacaccagtggatctgggctcgatcctccttagtcgcatgcgtgtgtgttttcttcttttgtatcagccaggataatgcagggtgtgttccaggcctctgtgattaaggtttcagtaacactctgatgtcattttacaaaacaaaactacctttgatggaaacagcttattgtgtctttagcttttgttgtttttattatttacatctcttgactttgttttttggtcaaatatgccagagacatgaaaccatatacctcaacaaagtcctgtaagttagatactcagctttgtttacacttcaggtagtttttttttcttaaaatagaaattttatttttgggaatttttgtgagtttcgtgattcacatactgctgtgagttactgcttggactgctaggttgggaggctgtagacctgggtctgccgtgaactgcttttgtgacccagcgtcctgagccccagttttcttgtttgtggaaacaaggtgagggaattggactggctgatttcttctgaagtctctttcaattctttaattctgtctctcatgggccaaactcacagagatagtaatttaagttcatagcacatacgtgccatattttagctgataaggcatgctgcaccttgtacataagatacacgtaggtactgtggcccttcaatcacgagtcagcctcatggcttcctgtcgtgtggttgtggactgtggagccaccagccttcctgcttgactctctggtgactgccagcatgatgagtggggccacctgcacttatatagctatctccatgccatggaaactcatccttttgggggttcagcttcagggggtgcagtggttttaggttacatggatgaattgtagagtggtgaagtctgggattttagtgtacccatttcccaagtagtgaacattgtactccaatatgtagtttttcattcctcacctccctcccactgtcccttctcctgagtctccactgtccattataccagaactgtagattttattgccagagtttgaagctggtgcccttgggctttggagacgatttggtttaaatcctgagtgctatgatgctagttgtgttcattgattggactctgtatgttgaaccttaatttctgtcatccatcaaatgagggcaacagcttctctctgaatgtttttgagggttaaatgttatagcgcatgccagctgcttagtaaaaagcataaatgttgttggtggtgctgagaaagaagaactattatgatgtgggggtaaagaacatctccaggccaggcgtggtggctcatgcctataatcccagtactttgggaggccaaggcagcaggatctcttgagaccaggagttcaagaccagtctggacaacatagcaaaaaaaaaaattatatgtatataaaaattatatccatggccctggggttgcaggagcagggattcactgtctgcagaacaccagcaaggagaagcccccatcttttggagttgctgaggcagatagtgagcctgaatgtgtacgacctctggtaactgtgctgcaggtgggaacaacccattgtttacgtttataagatgctagctcaataaagttacatgagtctcggcactggagatttgtgttaaggaccaactatgatttaaaaataatttggccccaggatgttaattgcagcattattttatactgatgacgaattacaaatcacctaaatatccagtatcctatacctacaaccttgggatagtgtgtaagtaaaagtaaaactggagcacatttagacctatggcacttaaaaacagcaaacatttgctataaagaattactacttgagaagatattaatgatgaaccactaacaggcaacaaaacaggttaccaaacagtatgaccccagttaattattataaatgaaataagtggagggaaagtgaaggaaatgcatacagttgttaaaggtgagtggtttgtccaccatcagtggatagtggcctaatacttaacttattttccttttttctttcccaatttttcaataaacctacatgtctcgtgttggggggaaaatcatgtcatccacaaaaaaatattttggctggattttcagtacttcaaaatgtgacagacatttctcccatgttatttttgtgcccactgccaagttttaaccatttcattgcgcaggccttgtccctggcttaatgtggttatctgctcatgtgatgtggtttgagtctacaggtaaaaaaatagattttttttttcaagtgtgtgaactaggaacttgagaatgatgagggagaaaatggaaaattcacatagcaactcatcaacaggttttttgaagtgaaattatgtgctcttaaaaataatctaaaaccaggaaagagcacgttagagcctatcagctcagttgtgaggtagaaatcacagacccagctgggcacagtggctcacgcctgtaatcccagcactttgggaggccaagacgggtggatcacctgaggtcgggagttcgagaccagcctgatcaacgtggagaaaccctgtctctattaaaaatacacaatttgctgggcatggtggcgcatgcctgtaatcccagctactcaggaggctgaggcaggagaatcgcttgaacgtgggaggcggaggttgcagtgagctgagattgcgccattgcactccagcctgggcaacaagagcgaaattctcaaaaaaaaaaaaaaaaaaagaaatcacagacccatgcttttcctctgtgactttatgtgtcatttctttcttaggtgactggactgatgttctgttctagatgaaactccttgaggggaccatttgaaaaggcttgatgtgctgcccaaagcccccttcagagctgacttctccacccccagctgccgtgagccttggctgctgacagctcatagctgagtccctcccgtgaagtcaccttctgctgaagggtacatcctctcccaaggtgaccccctccaacgtttagtgtccattgtaataatgcgtctacaaaaatagaccttttgaaggaagagataaggaaagctctattttcttcctgcagctctctttgagggcctctggatgggaattcctagatggagaactccctgtgttgcagtggtggagggtggggagctggggatgtgtctctcttgtatctgcagtgccaggtttagaggaggctgacttggggtgtgagaaatatttgctggaagcagacagagagcagtgaggtgccagtgaccttggtcagtcccagtgttggaggctccagtggggagccgcccttccttcgaggagggttctgtccttttcacagatttcagagagtgataataatacttgttatttatttatttagagacaggttctcgctctgtcgcccaggctggagtgcagtggcacaatttcggctcattgcaacctctgcctcccaggttcaagcaattctcctgccttagcctctggagttgctgggattacaggtgtgcaccaccatgcccggctaatttctatatttttggtagagacggagtttcaccatgttgcccaagctggtcttgaactcctggcctcaagtgatctgcctgcctcgtgctgggcattacaggcgtgagccaccatacctgaccccgttgttatttatttagtgaacatttattgagtacctagtgtatgccaggcattctgacacatgtcatgggtacagaaggaggagccctgatccccagcatacacacaattcctatccagtgtgatggggaggtccctggggagcttgaggtcctgcgagggagggagggcgggcaggtgcacagagagggaaacagcctgcctgccttggggctaggggtcaggatctgcctctcagaggagccgaagcttgaaccttcttgatcagaagagcacggaggatgctccaggcaggggattaaccggggagctgcgcagtgttcgtagtggctgcagtgtgcagggagtggtacatcaaatctgtaaaatgtgtctcagagctttattaggaagtgtatgtgaataggctcctttaccaacactgtcctccccacggagttggggatggaagattatccccacttttacaggtgaggagacatcccagagaggttaagacagtttccccaagagggttattggtcaagcctggattgaacctggcttcctatacctggcccacttccccagcctggcaacactgcccctgcctaatacaagagagtccaccagctctcgggccatggctgtctgtcatgggggcaagtatgcccaccctggactgttctcttctctcacatgagtcatctcctgggttgtcagcctggcatggtgtccacatgtgggctgatgggtcaccaggacccttggtctgagctgaggcagagagggcagggtgatgggtggatgctaggctcttgctgtgtttggaactgctggggagacactccctctcccccactgtcaatctggcttgcacgctcccattcctggagttcagatgggtggggttgggagtctgggagcaggaagtaacaggcctgactggccctctgcagacagagtagatttagaggaagcccagaacctcatggaggggacacagggctatgtctttcacagtgggtttattataaatgaaataagtggagggaaagtgaaggaaatgcatacagttgttaaaggtgggtggtttgtccaccatcagtgcctaatagttaacttattttcctcttggtacttttttttcctttcccaatgtttcagtgaacctacctgtctcacgtgttgggggcaaaatcgtgtcatcaatagggcttgtgcacagggctgtgtcttgtgtagtgggtggggaatgggccttggagccagccagacctcactttgccatttgctggctctgtaaccttggatgagtgacttaaccccaaaaccttgatttccttttttgtaaaatgcatctctcccacccagggctgctcccccgaggattgaaagaggctctgtgtgcaaagagcttagctacagagctgctatatcttaattcatagtgagtgttctccaaacgttagttcttctaattagtcttcgtgcttcttagtgtgcctggctcacagtggggtaggatttgaaaagaacgtatgaactcaggtttatgagtgtttgttaaataaggaagtattagaatttggattaagttgtttctggcctccaatacatgaagcaggcatggtggatttttgctgcaagcaaaaccatcctgctttcttaacttcccctggctctgagcatttgtgattcttctgcacagcccttcgaggattttctttaatgtaaacacactgacaagggtggtatttaacaactggagtctggtttggctccgggtacccaccgttgtcttgggtctggcatccaaggctgctgagctggtgagtctggtgcctggttggcatgaaggcatcagggtaagtgctccccaaccccatccaccccgccaaatgtggttgtgactgcaaagtggccagtatgtggaactccctagtgggcttgcttggcatcagtttgctgggaggatctctgctgaggacacaggagtggccatgcaggctgacaatgcctggagaataaggatgggaagtgggggccctggagcccgtccacccatctgggtgtacacaggctggaggcagcagccccggggatggggtagggaggcttcaaagctcggagtgccaaccttgactgtgccctgtgactcctaccttgggatttgtggtcccctccctgaattctccctgcccacctgagactgcagtgggggagggagctgtaggaggcacaagcaaggcgggtggtttggggttggagtggcctgggaatccctggttgagagagcaggctagataacacgggactgcaggtgggacacttggcctctcttcccgagtctaccactcacttgctgggcagcctttgacaggacattcagaccctctgcgctgcagtgtctttagctgtaaaatggggaaactgtcgccttgggtactttcctgatctatgatgctgaaacacactggagaattgccagtgaccttatttttttagataggaatgtggtaaaagacactagaaagctgtaaaagaatatagaatgaaagagtaaacctcccttatactgtgttagtccattttatgttgctatacaggactacctaagactgggtagtttatttaagaaagaggtttgtggccgggcgcgatggctcacgcctgtaatcttagcactttgggaggcctaggcgggtggatcacctgaggtcaggagttggatacccgcctggccaacatggtgaaaccccgtctctactaaaaatacaaaaattagccaggtgtgatagcgcacgtctgtaatcccagctactcgggaggctgaggaaggagaatcgctcgaacctgggaggtggaggttgccatgagccgagatcgcgcctctgcacaccagcctgcgtgacaggagcgagactccatctccaaaaaaataagaataaaaggggtttatttgggctgggtgtggtgactcactcctgtaatcccagcactttgggaggccgaggtcggtggatcacttgaggccaggagttcgagaccagcctgggcaacgtggtgaaaccccatctcttttaaaaaaaaaaaaaaaaggtttatttggctcacagttctgcaggctgtacaagcatggctgtacaaacataaattttatggtttttttttagaggcggcgtctcaccctgtcgcccaggctggagcaagtatagtggagcatctgcttcacttctggtgagacctcaggaagcttttactcctagccgaaggtgaagggggagcaggtgtgtcatgtgtctagacagagaccgagagaggaggaggtaccaggctcctttcaacaaccagctctcacctcttgcttgaactaatagtgtgagaactcacccatgacggtggggacagcaccaagccattcatgagggatccacccccatgacccagccaccttccaccagacaacacctccaacatcggggaccacatttcaccatgagacttggaggggacaaatattcaaactatatcacatacccagtcccactgcctcccagtgtccctggtcagaggcattcataacagcttttagagattttttgtgcatgtgcacccataaatgtgcacatgtgttccagcctttaaaatttttgaattgtgaaatatcatacattcaaaacatatataaagtttaaagaatgataaactgaacacccatgtacccacaactcaggttaagaagtgaaatattcccagtctctagaccccttctgtgttccacaatccttttactgaagtgagaatatgctatttatgctctttttactttttttacttctgtctggctcacatgtcttgttttttttttaatagctgataacatttcctctatctggatgtaccattattagtagtagttttttttaagcaatttcctcttgatagttacttagggtgtttccaatcttttgctgttaccaacaatgctgcaataatttttctggcttccaagaactgacattaattagaatgtgctatgagaagtcctattagctgagcatggtggctcactttgggagcactttgggaggccaagacaggaggattgcttgagtctaggagttagagaccagcctgggcaacatggtgagtccctgtctctattaaaaaataatattaggccaggcgcagtggctcacgcctgtaatcccagcactttgggaggccgaggcaggtggatcatgaggtcaagagatcgagaccattctggccaacatggtgaaaccctgtctctactaaaaacataaaaattagctgggcgtggtggcgcatgcctgcagtcccagctactcgggaggctgaggcaagagaattgcttgaacccgggaggcggaggttgcagtaagccgagaatgtgccactgcactccagcctggcgacagagcaagactccatctcaaaaaaaatttttttttaaaaaatgtcgtgttgtctcagcatctctgacctgtcagtcctttccagagcaatacagaaacatttgcagcacgaaagccctgcatggctctagtctcctaacatgttgatgtcctgtgccactctccctgtacctgggtggtgccagcattcctgtctgatgccatgcctctctggaagcccctgggggccgggcccgtgggagagtgtaggatcctcattggatcctcagctgggtgtctgccatgggcgtgcccacatgcagggtgtggagaagtatgctgatgggaactcagctgcaggcttggctccaagcagagttccttttcttttgattgtgcaacatccctgcgagggatctgggtctgcccttctgcttttcttcatcttcctgcagtggggaatgaggcagggggcctggtttgggggttcaagcccaggccacttgagcttttgagacgaggctccttgtttttctttgcttgctccatctgccactttcccttttctcttctcttttgttctttctccttttctctttcttcatcccctctttagactacaattcctggtaaccctggctcattcttccatccgtgtgtacaaaagttctggctcttctctttctcccccatctgaatgagatttgggggcagtagagtgaaagtcagagacagtgaattggaggttggggccctagcctgcttttgcttcttctctcccctgtggggctgctcttcttggtatcctcactgcctcctcattcaggtgtgtggctgtgaaatgagaccagatctgcccaggaggaggtcatgaagaatccacagtagggaagatgggggcccaggggttgggaggtggctgggaggtccgcagggagaaaaggaggggcagctgcgttctcaaaaatgacagtgtttccttgcttcaccaatctgggcagaaagggctgacccagaagcttgttgcatacaattggttcaaagaggccaacaggccaagatctggaagcattgtgtgtgtgcatgtgtgtatacctgtgtgtgtgctcagacccttcactggaagatggtaaggtgtcgggcaagtgtgtggactctgggatggattgcccaggtccattcctctctacctgttatcagcatcctggtgggaccttacagaaataacttctaagtctccgtttctgcatttgtacaagggggctgttgagaggatcaaatgggattatccttaaaaagttaagcatatagtaaatgttatgtaaatgctagctattatatgaggtggttttgttgatacttactgtaaaagaccacagcagactatctcatttatcatggaaaataaggttttgttgtaaaattatgagaaagttatttttacataaaaccattttatcttccccattgttaaagaatgaagatgaacggaaccttagagttcatcctgtggttttcaaaaaccttcgccagagcaatccccctttttttcccgagtgaaatcttacatggaaagccaatgtataaataaggtgaaatggaagctgtactggtaggaggatcaggggtgggggttacagaatgtaggcagcaaagacctggggggtcttcctgctggcttcctgagcctcattcttgtggtccagggagcagtttgcaactctaatacataattgagttgtacaaataggtactgcctttttggacggtaattgatagtattacccttaggcagctgacccctgtaaattaccatcattattgaaattgaaaatgtatgttccttaggattcagcaatctcacttgtgggactctgacacctatagaaacgataggctgtacacatacaagcataagtacaaggttgttcattgtgtaaagggttagagacacctaaatgtccagtaacaggggaaaggctgagtcaattttgaacttgcttaggtaaccataaaagggacaaagtagatctatggactgtcttggacagattttcgtgatatattcaagatgcagaacaatatatatagtatgatccttcttttaaaaaaccatatgtatatgtatctataactgtgtgtgtatctatacacacacatacacacatatacacacagatacacaaagcactctaatttttatgtttatttttttagaggtggagtctcattctgtcgcccaggctggagcaagtatagtggcatgatactagctcacggtagcctcaaactcctgggctcaagtgatcctctggccttggtctcctgagtaggtgggactataggctcatgccaccaatcctggctaattttttgttagtggtgtgtgtgtgtgtgtgtgtgtgtgtgtgtgtgtgtgtgtgtgtgtgttgggggtggggtaggggcgggggtggaatgtctcgctttcttgcccaggctggtcttgaactcctgacctcaagtgatccttgtgtcttggcctcccaaagtgctgggattacaggcacgagccactgtgcctggccacaaaacactctaatgctcattactttaggaaccagctgggaaggctacagaccaaactcctaatagtacttacttggggggatagaggggaaactggtgttttttactttatagttttcccctgtccacaaagggtggtactttgtgtaatttatttcctagttggtgttttctttcaaattaaaaaggaagggaaataaaagtatgctggtcatcatagaggtgagaaaatgactcacaagggggcggtggatttgcccagggtcgcccaggtctgtgtggggaagtggccggctgtttagtgtgtgcagcaggagagctcaggggctccgactgaagttagtctgctgggaggccccttgctcctgccttgtttttgccctcacaggctggctccagggctacactcctgctatactctgctcaccatctgttaagggagcagttggtaggctgtgagcagcgcctgcctccctcccatgtctaatttaaccagtcacccttctctccgtcggcctccaccaaggctgtgggatcattctttaattacttacaggggtcagtcacctgatgggacgcctttgctggagacagacggtactgacaagcagattagttgcacgttgggaggtgggaggagggaggagacgaggagagtgtgtgtagcagatacgagtgggtggcttcaaaatagaaattcatgaaggctctaggaaagtaattttaaacactgttcatttagaggctgtggttcaggggtgagcaaagctggaggcagcccacccagcacatgttgaccttgctttcccgtcagacttgggagggaggaaggcaggagtctcctcaactcacctttgcagagctctgaaactgggtctgttcaaagttacacctgctcgtttcttgtgcccgtgaattcctttctaggaatgatcaggcatccataggcaagatcttcctcgagagtcaatagacctgagcccaaatgtcagctctgtgtctgagctgccatgtgaccttggacaagctgcttcccttcccttgcttgggctgagtttctaacattcccaactcaggggatcaaaagaggtgagtcctgtggacttccacagctctagaatgttctgtgagtaatatgcccctacttgctgtttgcagggaggcagccatgagttagataaagccccggaattcgaggcatccatcccttcatgctggccaccaagcagacctgtggatgttgacttgtctcttgtctgcccatagatgttggcttggaatagggaggaggtgggacttattttgagcccgagttccccatgtacaaaatggggctaacaggatttgtcttgcagggtaatgaggatttgtgaaaacatggttgaattcctggcacatggtaggtgctcattaaatggtgttatacacttagtacttggcattcccagccttactttttgtctttgctggaaatatattccatgcggggagggaaatgggaatgatcttactttatagatgccacttcatagaaagcattggcactgggattgccagcctttcccaaagcagtgtgtgttccttcatcattctgctgatgatgatcatttatggagcaatttactatgtgaggtacatgataaccccagtctcctttaatcctcgtgaaaccctatgaagcaataagggactattattatccacactttatacatataaatgaagaaagtgaggctttgtgaagttgaatgatgttcccaaggtcacccagttagtaaatgctgaagctggagtcctcagtcttagttattaatgtaagcttgcttttcaggacagagagggctttggaggaccaggaagggctccaattctgaggcaaaggctgtgaaacaccggggtcaggcaggaaatcatgcccttgaattctttaacagggcagattttttaagtcagagacattaacgatcagctccgtataatgtttatggcctgtgtgaccctgccccgtggtgctcggtagaccccactgcccatgtgtgcctgatgattccatttctgtcttgcttattgcaagtgaccttgaattacctaaaacccagggaaatgtgttcttaatctgcccttttaacaatgctgattttacccttccaactcagatttaaataacctttccttctgtgttgtcgtgagtgtaaagaagcagcatcatgaaaaagcccagccctaaactctctgtaattatggggtatggtggagagggaggggcactgaaaaggaaataatggggtcgtgagaccattggaaattgcactggttatattcagtagcagagctggagatttttgcctgctgctgggaaaaatttaaaaagcaaaacaacctctgcctcagccttggaggtttagctgttgaatttactccctttaatttgaggcacctgaggctcccattttgtggtgtgattggctggactttccaccacttcttcctctctctggccagagagaaacttggggacgctgaggtggtttgtagcagctgtcatcaatgtccgcctttcatgtccacagtggtttggagcagaggcccagaaatgcttggggagtctctgtgaattcagaagaagtctccttctcccactccgctgtctgacagcaggttaaaaaaaaaaattacaaagagcttccaggaacaaaaagtggagatgattttttttatggcccttaaagacttgaaatttgcaggagaaatgccgtgtggttgcgtaattctatatgtggagtatctggaattattcctggagaggcgggcaagcacccagattagagatgtgtaaagtgcagttttgtcttgcagtccaagcaggtgagcattcaggcctgtgggaaggaaggaagggaacagcaggtggcagtaactgggaagcttgcctctgagtgagattaactagaatgtatttttccgctgcatttaaagagccagtgaaaggggcagatttacccagggtcacgtgcctggtcagtgccttaaatggacccagggtgtcagccccctctgcctcgacttcaacagagttaatgtttccccagagactaatagagggaccgatattagggattccggggacaagtacgaacaggtctttcgatttacatttaaaagcagtagagagcaggaaggagatttctggcatttgtgcagtttaaaaaccaactagacaaaaaatcttgatggagctgtttcccaatcagcctggcagtcctctcagcattgacgtcgtgagaatgaaagcttctctgagagtgccattgggcggtgtcccttccaagttctccaggaagcaaattttggaccctggccgctgactcagtgtggcctgctgggtggctccctgtgcctgggaggcggccctgtcagtgtccctgggctcagcccataagcaagtgccccaggtgatcctgctcccattcagtgactggagaggcagagggaaggggctcccgggcagtgcgggttccaggtgggcacagctggtaagccgggcggctgggcagggctctgcttcaggtgtgcagagtgggtgtgagttctgcacagcacaggaggtggtttctgcccttacccattgggcagggaaggaagcttgagaaatcagacttgattttagcaggacaggagcttgtgggcttctgaaagaatgcacgcctcagtggtacagggttctgggggtatatgcagcggctgctcctctcctcctcccctgagccctctaatactgatctcgcactttcctggccttgtccaacatcttgggaggcagaaaagcatagtttatatgtgtgcttgtctttatacaaggctctgtgtgtgagtgtgactgtgggtgtttatttaactcaagaaaagtccaagggacccctcacacagaggaggtgaggtgcattggacaacctgggccaggacttggaggacatgtctgccccgatgatgacttaggcccagtcccttagtatccttgggatatagccccctgatctgccccaaaggtggagttgggcgacaggagggaggcttggagatcatttctcgtgtcccttccagctctgaaatctgtgagcaatgttgtccagtaaggctgtctctaccaggtaacacatgactgccaagtgggtattttaatcactgtgatttcagaataacagggcgagctctcacagagcattcattgcttcatcgatcatgcagtccctgtggaacctgagttgatggcgggtctacagtcagttcagtttacttgtagctgtcattgatcaggtgcaaacatgcttttcaaagcctggaatcattttttttaagttggatcatatttgcttattataattggtaaaatttgagtgttgcccctaggctctcagagggaacagtttggaaagtgcttccttccaagaagagacgagatggtactgcgcataagcctcctttagggttgggtctttatgcaggcagatagtaagtgcttctggaacgttttgagttctgccccctactccatgagccgccgcaagatctggcttgttgggacctcatgggccagtggtcaggcccagcattatgaatctcttttggccaagttcctgggataggcctgtttcttctttaataactgcagtgtgaaacaagtcttattttgagtaagagagtgaggccccgggtggcgtttttgtgtttgcctaagggagatgcctcatctccagccacccagatgtgactggagagagccatgatgctgcttttgtttgtctctaattacacttaataagatgggggcaagggaggaaggcataagagtgccatagaaactccaatttcccctaaaattagaaaccctgaaactcatgagttgaatagaaaaacctagataatttgccgccccctttctctattttgttcaccttgctggctgattctgcctgattttaagtatttgaaatatgtctcagccagattttctggtcctctttcctcacctctcccctcccttccaacagaagggaggcccccatgtggtcttcttgcctagctgggcctcctgtgccccagagcgagaatctgagaacgcaggaattgggttgggactgtgggaaatttgcatgtgccatggtaaccagcaaggggatcctgggggatctcaggttaatgattaagccctgagccttcattcaagccaggcagtggcagtggccctcaggatttgcagccacctgccaaacgcagggcctcttacttctgttagcttttcaggccgagtgaagatggaaactgtcttggagggataccgaggggctggccgtgtgctagtgaatttgctagcagccacagccctgccgtgtcctcctctgagatgagagtgtgggccagcaggttagaactctgaggttcagctttcatcaattgcactcagttttaaaagctcacatttgtctttctttttgcgtaagcagaaagcatccgacccttcctgctctggtgttttctaggggcagcagtaagtgggcttttcctccttccctgttgggcaggagaatgcggagctgctcattaaagtcagcagatgagcagatatttggtcttcagctctttcatttccacctctttgcgatatgagacagcagacgttcccaaaaagggcttgcggtttatgttatcggtaacccatttcattcttccagatggtgagtgaaggaccttaaactccatacagagaaacagaggctgaagctggggaagattgaataaccagtgccagggtgggcttcatcctcttatcgtgggaccagctgtcccagtgactttcacttgtcggtactgcagtcctttctggaaaatgtcctgggacaaggatggtgcccagatgtggctgcattaattactgtaaaccccataatgaagaagatgtctccttacagccccctttcagtccttgaatggcctctaggagaaagtctgaatgtgacctccctttctaaaaagcaaggagtgggaccaggaggaaacaggccgcaggatcccggccttctgcaggcagtggggccccaaatatataataatgttgttttgtttcagttatgcttgtttttatggaaatcttctgtatggcacagatactagtgtctcctttatggcaatgagatagtttcttttttaaaaagtgagtagatttaagagaaaatattaaataatagtactggtggcatatgccagacttgatgaacagcccatgtttgagaaaccctgtttggctgcagcaacacatgtgcagcaaggagggccagcagtattggtgaggaagctccaggagtgactgagaaagagatcttactggaaagtctggcagagtcagtgcgtgcacagcaagaccgtcacggtggcagtttctttccgggatgggcaggcaggtttgtacaggttttgctgcaaaaatgaggagtgtgtgtgcatgtgcatactgttttttccttcagtagcagtaatattttacccttaaaaatgcctcttgaggctgggagcggtggcttatgcctgtaattccagcactttgggaggctgaggcagatggatcacttgaggtcaggagttcgagaccagcctggccaacatggtgaaaccccgtctctactgaaaatacaaaatttagccgagtgtggtggcgggcgcctgtggtcccagctactcgggaggctgaggcaggagaatggcatgaactcgggaggcagaggggcggagggtgcagtgagccgagattgcaccactgcactccagcctgggcaatagagtgagactcagtctcaaaaaaaaaaaaaaaaaaaaggctcttgaccaaccaactctacttacacacaacttgatgtgacaattctatttagataatttcaaccacagggaaacagctcaggagtttccaagtaaaaagcccaatggggaaaatctccttttcaaattctcccactttccggacagtccagtggttctcaaacttttgtcattgtcagcattgcttggggaagcttatagaagatggaggacccaccctgctgcacccagctaggcctctgtgcgctgtttctcccagggtgatcccgataacactagtgtttgagatcgtggcccaggttgtgagtcccagccctggctgccattagaatttcctggagactgttaaagctattgaggcctggatcccaccctagcaaagccccactggaatcttggggtggggcctgggcattggaatttttaaaatgcgcctcaggtgatgcggttgtgtgggcaggtggagactcactggctttgatggagactcttagggaaactttaacgaacatgtgggaatgctttgaggaagaagcaaagggcggcatgaggcactgaaagaaatgagtgcagctgcagaggaaccctcagatctgagttaggttttgaggacttctatgaaaaaatggaattagaagtcaagtaagccagggtgagtgggagagcagcaccagcctgttggttttagagcagggccaggagggttaacagcttcaggatatgccaagggcatcagaagggttcttgaagatttgttcagagcaagaggaacaagggtgcgatcagcctgaggcagaagccaagcaatacaccattaactcagggaggtggagggaagcagcgcctctctgttttctgttgggcccctgggcagcaagtgtaatccaaccaggagcaagagggaactgaggcagaaaccacagtctgctttaaatgaagtccacccctaggacttattttcctgggcacttgggaacctggttattaccatcacagggtggttttatcagtcaattgaagtagctaagaagggagatcaaggcaccggacaaccagagggggcaaaaattatcccagcttttgggaaattaggaaaacgtgaattccagaaactatagtctgctaaggctgggcttcatttctaagaaatttccagaaagcattattaaagcagttgctttgtgagcacatgttgagcccagtctgggtcaaagtgatggccccttcctattttcagaacaaggtgtgccaggctagccaggcctgttctggtaggtggcagacagccggcccttggcagagctattggcaaggcactcatgatgtcatcttcatgtgctccccacagtgaagatgggtctggctctcaggtaagccttcaataatgtgttagtgaaaatcctgtggagagacggggactgaatgaactattgtgtgtcagagtttaaaattcatcagccaccaccaaagcagagggggtgtacgaggccttctgtttggaagggtgtcaaagggagtttgttgcaaagtactgactgtggcaagcacatggttcatttgagtgcctgttatctgaggctggtctgggaggactggcagcgattgtagggtggagtcacctgccacatctgcaccagtgctgctgtcatcttgagagtggactcgtgtcagatgggagaaggcaccttcggcgtctgccgttctgcgttatggcatcaccttggataaaggcacattactggagacccaggtctgggggagctgagccaggatggatgaccagcaagcttataaagagtgcaggggtcagtgggacaagggaggttccgtgcaatgcagtgggtgtaaagctttgtacctggtcagaagcctcctagaaatgaaacccttgaagccttcccttgagcattagggtccagagtggccctagtgatctttaagatgatgaaagctgatgttagaagtgatgttcccaaggccacccagctgctaaggggtagctgtgcaagtactgacgggatagtgtaggtttgatggtatgaaaagacaggtttcagctgctgtcatgctccagaaggctctatggaggtgtggtagccagcaaggacaaggacaccttgggccatagcaatacaggtttgatgcttagccatgcacctggaccaaccaggcctcattgagatgttcatgttctgttctgggtaccacattttatttttagcttatttggttaaattagaaactaaagttgttttggaagaatattttaaagttctaaaagtagcgttacgacaactgaaaatttgggagaaattgaggagtacacattggaagagatgttgacaaacttgtgggtcattggggtgcagagttatgagaaataggaggtttgtggaggaaggatggcactcaccaccttcagggattggggccctctgcgagtagcgggggcaaagggtgctgctgggtccggaccctgactctgccaggccttgcaccagcccctttacatgggttgactccaaatccttggctttatcaggagatcaagcttatgtgaagctccaggatgcaggattcataacaaagggtatgcaagttatgtgataatgacaatggcggatgtttttcaagcccttcctatgtaccaggcattgtgctaggttgcatgagctccaggatacagaattcagaccaaaggctgtgggagtctgtaacagtaattgctgatgtctgtcaaggcctgagcccttcactttgtgctaaactcctttcatacattgtttcatttaatccttattgcagccctgtgatgcagtatttaggcttgtggttgctttagagtcaggaccttgaccaaggctatatattaggtcatcaggagttgtcctaattttctttttcttttttttttttttaatttcttttcttctttttttttttttttttttttttttgagctgaagtgcagtggctgtgatcttggctcactgaatctctggttcaagtgattctcctgcctcagcctcaggctgcagaaatttgcataattaagtaagagttgaattttaatagctgagacaatggagaaaatgtctccagggcattgcagagaccttcgtggcagcctctcccatcacaggcctggaggcctaggaggaaaaaatgctttttggagggcaagcccaggaccctgctgctgtgtgtagcctcagagcatgatgccctacatcccagctgctccagctccagcaatgactaaacagtagctgggattacaggcatgcgccaccacgcctggctaatttttgcatttttagtagagatggggtttcaccatgttggccaggttggtcttgagctcctgacctcaaaagatccgcctgcctcggcctcccaaagtgctgggattacaggcgtgagccgctgcacccagcttgttataattttcatcacaatgattgctgttccagacactgctaaatactttccatacattgtcgttagttctcataataacttgatggagatttaggaaacatttcgaggtaaaggaattgagggtcaggtgggctgctgtagcagagcatgcagactttgcacaaattactgaaagttgtccctcaggtggactgtgccaggtactgggcttggtggagattatgtaggctggattgtgcctccatgcctgcctccttgattggtaccttagccaagggctcagactgcatgacagctgatggctctgaagagtgagcaaggggctgagaacttggcagagcctttcagctaggaaatggcagagctggaattccaagccaggtctgctgattctggagccagttgtcataaaccactgtggaggggagaaagctgtatgcctgtcagaagcatccggtgtagcctcgaccatcctgaggcttgtctttggaagtggtcctgcgaagacaaggtggctgtccatcaacaccgcaagaggaatcccccagtgggtggagggagagtgggcttgatgaccctgaagtatcccctccctgattccgagaccctgtcttacatgtgaggccatctgtcaaaacttaatgtcttaaaatatgacattttccctgtacaatcttttccttttgctaatttaaaatcgactccatcctctccttccattctctagcccttggtgaaaaggcagaggccggcctcaagccacgtgcagcctcacaagtggtcattgtaggcttgtgggtgacctagtcccatgtcaggagccctcctcgggggcaggcactggtttttcatctttctgtgcttgctcacacttgagcgtcagcacattccagaacctacctcaaccgtaatcacggcacagatgtcgtttgacttcagttgttgggggctggggtgcaaatggcaagaattctgcagcagccttccagcgttggattcctgtctggggccaggatgaccttgggccaagcgagtggctcccttggctctctgaaaaagaaatctctgcctggctgttcccatcacttctcacggacagtaatgctagcagctgtgctgatggtaacagtaacacagtgagccccagttactgacaggcaatgccactgctgcctcacccttaccatttaccatgtgcctgggctgagtgctctaaaggcatttgcctgttgaatcctcacaacgaccctttgaggtgggtaccagcattcttatattgcagatgagaaaactgtctcttaagagagttctgagtaagatattttgagggaggagggtgatgtcattattttctttgctctttaataaagagtatacttcttgtaagtctaaagcagaggttctcaactagaggtaatttttgtcctccagggacatttggcaatgtctggagacatttttggttgtcacaatttggagagggagtttgccaccagcatctcgtgggtagaggccagggatgctgtgctgttcaacaccttgtgatgcacaggacctcctgcaacaaagaattatctgtccccaaatgttaatagtgcaaggttgagattctctgatctaggccgggtggctcctgcctctaatcccagcactttgggaggccgaggtgggcaaatcacttgaggtcagaagttcgagattctctgatctaaagagaagacaaaatcatattcagccttttgtccagtttggtatcgttaactcctgctcaaatcctgcttgtggtcgttggtgcagttcccatctatttctggttgtctttctactgagcacgtggaagcattgcactctcctaccttcttcagttaggtgtggatgtgtgacttgttttgaccagtgaactatgagcagaaagaaacatgacattaaagtggggaaacttttagtgctcatgtgatttgccacattccttcctcctaccctctcgtgctcctagatggtggaggcgccgtcagcctagtcctggtgtaaggaggtgcgggtcggagctcctagtcaactcacgatgaacacgtagtatgaatgagaggtaacctctgttgtttatactactgggatttgggagttgtttgttaccatggcatagcctatgcaatcctgacagatgtactctaagaagaacaaaacaagaagttggcatttggattaggcaggtgggtatctggatactgtggataaaagcccaagcatccagtattttatgggttgtttcctatagtgaagatgttgtgcttggccccgtgggaagtatagagaccctggcaggttgcttcatagaagaaatggaagggagtttaaaagatgagtctctgaggtctggagaggtttaatgacttacccaaacatctgtgaaggcacctgccgggatccagcagctgtgcccagcctggctctgtgaggctggtccgcagtcagccggccattcttacccacctcagtcagtggtttcaactcagttgcaggtctgtgaatatttccagggcaaagtctgtctttaccttcccagggcctctcgcaggctgtggcacagtcacgtttgttgagtgagttgggatatgggggggagaaggcagacagtgagcagtgccatgatggggtgcagctgtggggtttgagggttccggggaaagagatgacctgaggaggccggcagagaccctggagcctgcttgaagggtgggtacagacggggatggggcctgggcagggagaagggctggacatttctcacttctctctgagtttcacatgggcaggaagcaccgcagtcctgagggactccatgagggaggagcactgtggcggggggatgccttccctgagaggacatccctgccgccatctgcctgagcagatgctgccttacctgagtagcacgtgcccttgggagggctgctcctttgcaggaagtgcactgaaggctcatgaattatgctcatctccttcagcggcttggagaataatgatttagtgccaggagccggcttatcctggcccagagccagagctgttcccagcagcacagagcaaagtcagcttgacttacactcccaggtgcctcagtgttcctgtctataaaacgggcataatctggaaagctctgcctgtcttccactaaggtaagcatgtgggagggctctgtcccataaagccagggaaagatgcccttatgggtcagaaagggatggttcagatcttcagggaactcttaccttgagagggattgggacgggagccctgggacagctctgatagcacctgtggaatcagtacctgctgactatggccacgggctatgacacttcaggaggatagtccgtttgaatcctctgggagctggccagtgagagggagctgttctctcacctcctggttctgggtgctcccagaccgaggggttgacctgaactcgttgtgggctctacagtgcaacccgtttgcccctgagatggccatcccccagggtccacaggcctgcgcatgcatgcttcctgtgactctgccccttctctgtcctcattaacccaggagggattagttcttcatccaagaaggtgcctgcctgcagtctccacctgagctgggtgatttgctcggatgcaggcagcagaggtttgttattagtgctctaagagaggcaatacggcaaacagccctgctctggagccagactgcttgggtttgaatcccagctttgccactccctggctgtgtggtcttgagcaagctgcgatctccctgtgattcagttgctttatcagtaaaatggggatggtagcagtatctccctcaggagagttattgtgcgtcttaaataagttagtgtaattaccataggcagaatgcttataccagtgctggcatatcatacacatgtttgctgttaatattttttgttgatgtttcttccattttgtaccaggtattggtgtcaccaaggggttgccatcaaccatgcttccagttggttctttgatagaaacagtgtatgtgttttcaatcttacttgaagcaccgtggttctagtctcagcccacccactatgggggagcatggggcatcagacctcaggggtgaccaggatggcttgtgcatagttgatgttcttggtacttttctcatttttttcttttcctagaagatagcctttaaaaaacgatgcattgcctacacaccataagaatgtaaaaacaactggttcagggcccccacctaaccaaacttttcatatttctatgctccctctttgtccttgtctgcaggtggatatgtatctgattcacctcctctgccccaaaaacaccacgggaaggcaatagtgtagtaataaggtcggttttgggttttggagtctgaggggctttggctcagtgtggccttggccccttgctggctggaccatcttgcttaagtgaattttagtttgaggaacctcaccctcactttctctcgtagcatgggaataatactaccctaactcatgactccactgcaataattacaagaggtagtttaggtaaacattctagctcgatgtggttgtttaacaaagcgtagtttttattattagttgtagatgttcactgtagagtttttaagcactgcctgatactcgattatgtggatgtagttggatttgtccaacctgtgtctggggttgcacatttcggtgatttccacctccccttcttggtcatctctggagagagcagacttgcgggccggcagctgggagtcccctggagtcttccctttgcagttggtaacttggtgttcttggggatttgtccagcctttatctcccatctccccctcccaccccctcctcccacccccaagctgcatttttctgtggtgcgagtgttggttcagctccctaggggatgctttgggctccgcaggtgtcatgagtcatggaaacccccagccctgcccaagcctgaggaagaccgaggggaaagctttttcatagcctgacaaacaggtatttcctgtcagcccccagctgtcagagaagttggtccctctggtaattcagagagaagagccgcacacatgccagcctcccacccctcaaatctcgggatctgatgaaaaaggtcagctgcactgtctagaactttctgcaataattgaaatgttcattctgctttttccaatgcggtagccatcagccacatgtggcttctcagcactgaggctgtggctagtcctagtcggggtgtgcagtgtaaaaatgcttggtggattcagaagacaatatgaacaaaagaatgtaaaagatctctttaggctgggcaaggtggctcatgcctataattccagcactttgggaggccgaggcaggcagattacgaggtcaggaattcaagaccagcctggccaacatggtgaaaccccgtctctactaaaaatacaaaaattagccaggcctggtggcaggggcctgtaatcccagctactggggaggctgaggcagaagaattgcttgaacccgggaggtggaggttgcagtgagccaagatcatgccactgcactctagcctgggtgtcagagcaagactttgtctcgaaggaaaaaatatatatatttttaatgttttatatttatttttgtatgttttgtgtgattatgtgttgaagtgatattttgggtatgtttgattaaataaaatagatcattaaaatctttattgtttggcttttttttttttttttttttttttttttttgagacagaatttcactcctgttgcccaggctagagtgcaatggtgcgatcttggctcaccgtaacctccacctcccgggttcaagtgattcttctgccttagcctccccagtagctgggattacaggcatgagccaccacgcctggctaatttgtatttttagtagagaaagggtttctccatgttggtcaggctgatctcgaactcccaacctcaggtgatccacctgcgtcagcgtcccaaagtgctgggattacaggtgtgagctactgtgcctggcctttgtttggcttttaatatggctactagaacataccaagtacatctcttggatagtcttattctagagcgtgtagcctggcagctgctgtcctgccctagaaggggctatcttggcttcagaggggagaaatgaaacccatctgggtacctccctaatctcccacgtgcccccagtctcctgctccccaacctgccaccttgattacaaaggagcaagtgccctgggcagtgttcactgtggcagccaccctgctaatacattactctggggtcttgggtcagcaagttaggttactgagggagcttctgttggggtggagtggcttgttagggtggactttggaggcgtggacatgggtttgaatgtgtctaactggacagaggaagccatgagccctgtgtggaatcctggctctgagcagttagaataatggttatcattgactgggtgcctatggcctgccaagccctatgctgggaacttttatcatccctctgaatcctcccactgacctggaaggtgctgtgatgtccattttgcagatgaggatcatcaagggcctaagttgtaacatactagcctggagtcctgctatttgtaagtggcaggagcttgtagtgaagcccctctctgactcaagatcatgctctttgccccacatcactcctctctgggcttattgcctcttctctccaaccctcagtttcctgatgaaaacaaaggggactggacacttgctcacaggaggtgcaggaagggcagggacaaacacaggcttgagattcagcctgtcttcactgggccctctttcctaggtttgggcctgaattttttttatttatttatttatttatttatttatttatttattgaggtagagtcttgctctgttgcccaggctggagtgcaatggcgtgatctcggctcattgtaacctccacctcccgggttcaagtgattctcctgcctcagccacccaagtagctgggattacagatgcctgccaccatgcctggctaactttttgtatttttagtagagatagggtttcaccatgttggccaggctggtttcaaactcttgacctcaggtgatccacccaccttgacctcccaaagtgctgggattacaggcatgagccaccgttcccagcctgggcctgaagtttgaacagacccagcagagaagccaggtgcagagggtttgggcagccaggcctgatgctccagtggatcctctgcagagtgagcaaggaaagaacagtttcctacattccaggcatttttctgcaaccctgcttcctaggccaagtggcttttaaataccaaataaatattaaagaagccagagcagtctgggtgcagtggctcatgcctgtaatcctagcactttgggaggctgagtcaggaggatcttttttttttgtttttttgagacagagtttcgctttgttgcccaggctggggtgcagtggtgcgatcttggctcactgcaagctctgcctcccgggttcacgccattctcctgcctcagcctcccgggtagctgggactacaggcacctgccaccacgcccggctattttttgtatttttaggagagacggggtttcaccatgttagtcaggatggtcttgatctcctgacctcgtgatctgcccacctcggcctcccaaagtgctaggattacaggcgtgagccaccacgcctggcgactcaggaggatcttttgaacccaggagtttgaggccagcctgggctacacagggagagtttgtctctagtttaaaacaaacaaacaacaacaaaaaacaaaatagctggatgtggttgtgcatgcttatagtcccagctacttaggaggctgaggttggaggattgcctgagcccaggaacttgaggctgcagtgagttgtgtttgtgccattgcactccagcctgggcaacagaacaagaccctgtctcaaaaaataaataaataaaataaaagccagagcccttcattgtgtgtgagaggccacgttgggcgagcaggggcaatacccagccttggctttaatctccttacctagaggtgggcagacttggctcagaggtagtggagttcatcatataatcctagttttgggggcctgaggagggtagtaccctaagtgccagcacttcaccttgtccctcctcttggcacttgggaactggggaatctctctcttcacacaagttcacctgggccctgcctcaaagcttgctgcaccttgtccggagagaacctttctggttttccctttttccatggacttctgatcctttcttctgagggccgtgagttgtggcagaaccaagactctggaaaaaccatccctgattagactgggaaggtggcggtgctgccccaccagggctcttcctgaccgtggttatcccagtgacctctggcacgtcacttcacctcaatgagcctcagtttccctcatctctaaaagggagtgttggtggtgataaaacttattcactgaagagttataaggaccgagtgagtagacgtaaaaaggcttggttgccaataaagcatgaggtaccagcatgagtggtcattttgtgtagtttaatggatggtttttagacacgatgaaattggaaagagtgtgggagctagagagaaatctaagtcctaacaccgaagagctgagtggccttagcttaaggtaatttaggtaacttaacctccccaagcctcagtgccatcgtctgtgaaatagggcatttgagaggatttgagtgaggctgcactgccgtccgttcagagcagatgctctcttgctggttcatttttccaaatgcatgggttgggggtatgatgtgcttggcagaagcctaccaagaatgcttatctaatgtcttttaaaagtgtacagataaccatttcctggctcaattctctgcagcaaatgcactttgatcctcctctgagcatcccgcattgcctgccaggcacccttctgagccagagttatcttggtatggagcgccgtaccacccaggagccatgtagcatgttccccattccttgattctcacaactgtcttgagagcagggagaaagctattatccccatctgagaagacagagtctcagaaggtggggatgagcctgcctgtgcacactgcacacagctcttggaaaaacagtctagaagctctaaaaacaccttttctgtccacttcctctgctgtttacttctttcttaggaaaaaagtgagaagggtgaggagtttcctggctagagattctagtgcatcttgctcctgcagaatgtttggctgtgaagaggtaggccaagaaacgtggggacgcctggctggggctggaacactggcaggcagctgactggactgtcatgacatctcagagccagaagcctcttacctttcttccagtctgagtgctctggaggtgcacttgctcaccagtgtggagaggtagaaggctgggagagtgtggagggtgggtgctgctgcgcattgagggctgtctgtacttggctgggaagaaactgaacagtgccagaaggtagggagggggagcattgttggtcacttggaatctggaactgagaaagacaagaaaacagcctgctctctggagcagttagaccccactcaggaggggcctgtggagcgttgggccaagtttcctgcaggacctggggcgaggtgggagtgggatgcttctgggctggcagggctgggctgtggctccatggctgaggtatctgcatagggagaatgtgtgatttagaggcagcttggtcagcttaggaaatggaggttcctgaggcaaaccttttcagtgcccaagcagggttgcctaggtgagggggctctcagggtcagactcctctgcatcccgtctcaccggcgagaccgttggtgtgatgagctgcaagcatccaggtttgtttgcttcctgccacacgtggcaattcttaaaactagtttttggtgttaggataagcacacccgacaaacatctgctgaagtgtaagcttgctcatcagggagaatactctgattgatgtggactttctaggatagcagagcccaagtggctttgtgcaattgatagtagtcatgtgtatgttaagttagcttgagccgactcttcagggctggagtagaccagatcctgaaccccttatcccctcatcaaggtcctggtgtgtctctagcctttgttttgatgaccccagcaaaattccctgctctttctccctgtagtgacttctttgttgctttctgagctaggttaggtttccatcactaatctgtggagaaaatgtgtatatcccaagccatttcctccttcagaggagcttatgattttggcttggaaaatagagatgaatatactcgaagcatccagggaaggatgaattgctgtacccttgccagtttccagtggaacataaatgtgagcatttcttctctgaagaggaggattccaggcatcctggaggggtgataaagtggcataggattcaggttcaatcaagatgtattgagaatggccaggtgcagtggcttacgcctgtaatcccagcactttgggaggccgaggcaggtggattacctgaggtcacaggagtttgagaccagcctggccaacatagtgaaaccccgtctctactaaaaacaaaaattagctggatgtggtggcgtatgcttgtaatgccagctactcgggaggctgaagcaagagaattgcttgaacctgggaggcggaggttgcagtgagctgagatcacgccactgcactccagcttgggcaacagaccaagactccgtctccaaacaaacaaaaagatgtattgagaacctacggtaggctgggtttgtttggatctagacatcattccttttcatttttactttgtttatattgtaaaatattatacagactcagaaaagtacacaaaacataaatgtacagcttggtgaattatcacaaagtgagtacccttgtaaccaccgtccaagagaaggaaccctgccagcgcccccggaggctccctgatcatgacctcttctcttactgccacgcacaacattagcttgactttagtagtagttgcctccctgcttcttaaaataattatttacccaaaatatgaatccccaaacactgtaaatttagttgtgcctgttttttgaacttcctacaaggataatcatgctgtatatattctttagtgtctggtttctttcatgcaacattgttgtgaaatctgtgcattttcgttgcatgtagctgtcatttgttcattttcattgctgtgtgttattcgattgactgattagcacaatttttctatccattctcctgttgaacattttgtttgtttacattttgaggatattcctaaaaaatgctgcgggctagatgcggtggctcatgtctgtaattctgacactttgggagtctgaggcaggaggatcacctgagcccaggagttcaagaccagcctgggcaacatagcaagactccttctctataaaaaaaaaaatgctgctgtgagcattgttggacatgactcttggttagcctgtattgtgtatgtgcatgcacacacttgtgttgggtgtacctggaggtagcatcactgcatctcatcccatcttcatattaaccttgtaagccgatggggagagtggctcaccttagcaagggtgtgtctgctgggaccccagggaagctttgcttactgtcctatgtctataccccttgggttgtctctgagcttctcttggggacgcatcgttttccaggtgttgtgaggaattacagcagtaaagcttgcttgatgcttatgtttaacccctgcaaggcagaatacgggagttgcatgtagccagtgtcgggggctggtgaagaagggtgtagggctgtgttggggcacagcctgctcatcacacaggtcctccagagtggacctgaacgctcaacccctttaatctttggtgtctgcctgcagtgtttcctcccaagtgggtttggtgcccttccagcatattgagtggagaatcgtcggaaaggctgaggcttcagccgagtctccaggccactgcttgcggtgcagctaagctcttaatgtgttttcataatcaaagcagaaaggtcccattgtggcgctaacgcctttgccataaagcactttttgtttcctaacaaaattccaagtctcaaaagcaagtcagcttagcaaaaacacaataccaatgaatggccatttgccacttgcaacagctaggcaagctcccagtaaataacactcggtcagcctgtgttttattggggcaccccaaagacatgaaaatactttgcaggctacttggaggaaaacagtaagatattaggagtcatatttatcaccggggaattataacctgatattaaggtgccagttagggtttgcttggctatatatttcagaaaattaagtaaggctggggacagtagctcacgcctgtaatcccagcactttgaggggctgagataggtggatcacctgaagtcaggagttcaagaccagcctggccaacatggtgaaaccccgtctctattaaaaatacaaaaaactagctgggtgtggtggcgtacgcctgtaatcccagctactcaggaagctgaggcaggagaatcccttgaactcaggaggcagaggttgcagtgaggtgagattgtgccattgcactccaacctgggcgacaggagcaaaactccatctcaaaaaaaaaaaaaaagaaaagaaaagaaaagtaacactggaagtaagggattatttttcttatgaaacaaaaagcccagaggctgacagtcttacggctccacgttgctgcctcctgtctttttgctttatcatcttcagcacaaagcctcatactcccaagatggctgctatatctccaggtttcacatttgcatttcaggtaggaaggtggcttttgtcaactgcctcttatccattttaatgaggaaaactaactttctggaagtaccaagcaataggctttcccttacatttcactggttagaactggatcacatggcaaccactggttgtcagggtggctgggagctaagcacattgttatttgaacaaaatcagggattcccgaggttaaggaaggaaaaggaggatggacatggggaggcagctaacagcaggtgccatgattcactggataaaatagataggaaacaagctgtttcatagaaagcgaatttatattcagtaactgaaacattcttgtaagcactaaaatgtattttaatcattttaattgcagtcatgtgccgcattgtcaacaacagaccacgtgtatgacagtaatcccataagattatagtactgtatttttgctgtaccttttctgtgttctgatatgtttagatttgtcttacaaatgtattacagttgcctaccatactcattactctgatgttcacacaaagccaaaatcacctaaggacatgtttctcagaacgtatttctgtcgttacacgccgcatgactgtagtttgagaagacacattttcttctaaacaacttaatgactttttcggtgtggctgggagtctcagtaggctctactgaggtgtggtttgaacggccactttgcctctcatataatggtcccagaaaattatgctttttaaatcttgggtctgcttcgtagtttttttttttttttttttttcatttattccattattgctgccaggtcttgtggcctctgtgcatttacctctagaaacctggttcttttcaccttaaaaatgttctgctttactataatctatggatgggagaaaccagagaacccaacatggtagaaatgtggattgaggaaggaggctctgggggaaaccatagactctcctctaggttaggtagggctttcatgagcaggcttagtctgttttatcagctctgatctcttctggcctatcagataaaagaatttgcctttttttttgttaagggaaggagtttgaaatcttctccagtcaaggcactatttaacaattggctctccatggctgacttaatgctaattttctcatcaccattcaacatagcttcctccttacctcatctgtctttgtgaatgcagcccccattttataagcacaacctctagaaaacctggttttatctaactaagagacctatcacatccaggaagttgccaaaggagaaaatcgagaaaaggtagttgtgtgacgttgggctagttacctgatctctgtctgttttctcatctgtgaaagagcaatcgtaatgattgccttatggtcattgtaagaaatgaggatgagttaaatggaatagtgcctagcatgtagtaaatgctcaaaaaagctattatcattaatattatcatcattatcacagatggggtgtgttaatcacagattaacactgatgtgggattgggccaccctgggagggtgtttggacagaggccaatgtgagccatatttacctgatgagagagatcaatccattgttggaacagacgtcttcatgtgcctttgtcctcgctccctttctgtgatagtgcagagtagagtctccctccccctcctcctcctccccctttcatcctttcttccttccatcattttcatatctgattacaagagtaatatatgttccttgtagaaactttgaaaagcatgaaagaaaattgaaacactcttaaaaatgtatatatagagagaacttttcgaagctgagatcatcctgtactttttgctctatagcctgctttcattttttattttctttcttttttaatatttaaagagatacattctgagccaaatgtgaagaccatgacccatgacagcttcaggaggtcctgagaacatgtgcccaaggtggttgggttacagcttggttttatacattttcgtgagacataatgactagtctaaacattaaaacagagatcttaatacaaaagagaccctttgtggcaatgagataccaaattccaacctgactctagtataacatcttaacatcacatgacagatagcaggccctgaaagaaagaaacaaaaacaaaagtattttatcctaaaatagatttctttgatatattttgaaatggccctgcaaagctgtctcttgtgggagaaatttacattctgtagagaatccccttccctttctaggtaattttctgatcctgaaaagattaactgagatcctagcaccttttaaaggtctgaatgggaaacatttgtcgtctattgcctttaagggtggctacctatgagacttcatctacataataagaaccttgtgctccacaaccccttatcttaacccagacacttgtttctattgattccaggtctttaataactctttttctttttattttatttttatttttttttgagccagagtctcactcactctatggcccaggctggagtgcagtggcgtgatctcggctcactgcaacatccaccccctgggctcaagtgcacaccaccatgcctggctaattttatacttttagtagagatggggttttgccatgttgcccaggctggtctcgaactcctgattctgagctcaagcaatccgcccaccttggcctcccaaaatgatgggattacaggcttcggccactgcacctagctgataataattctttcattttcattggacgataaactatgagtgttattgagtaccgctcctgtgtagcatttcatcaaatggatttcaacctggagttggaagagaccactgaggattgaaggtagattggttttcctgggtgagctcagagaatccacccttggcccacttctgtattgtaagacttgcttttttctaactgagggatggagtgcattgcagttgggtccctatgttatgtaattgtgggggttgtaagcttggattgtaagtggaagatttggggacttgggatgatttcagatataggcaagaatggaggaagaatgattgtaagctaaagcagtaacacgattcaagctatttattcatttggtcattattgaggacctgctgtatgccaccacatgaggccagatgctcttgatacagaaataaataagaggaccttctagtttcagacagcatctgtctcagtgagtgaagacttaaaaaaccaattcatgcagtaggctgttagagatgctctcattgaaatctatcctgtccccaaaaggagtctgaaggagggagttggcaaggggggagctggcaaaggctttgtagggagcagggcattctaggtggagagagcctgtaaacaaggccccagaggtgtgaaacagcttggatggattagcttagcagtaaagaagcaatagctacaccttttcatttctcaatccacttaatactgggtggagtagctgcacttgtgaaatttggcgaaccttaatattcttaaagaaaaaggcagaaggtatgtatttcgaaagcatcctatagttttctttccgtcctttcttttggaaagtgtagctcaccccctgaaaagcatagaattggtttctgttaactctggtgtttgctgtctgcctgcccacccagtgcccattcatcatctgagtgccccctctctacaaggcactgtgtcggggagctcagagcctgaccttgccaggctcttgcaatctgggtcggtggacatctatgttgataattgatgttctgtgctgacaagttctgtgggaaagtggacgtaggagcaagcactgtgttggcaggagtcgggaaagcttaaggctgcgatgctcaaaggagaggataaatggtggacactccctagaccctcctccctctccaccaaaggcatagccttcatagtgctggaaatgttccatatccctccattgtgccgtggtgggaaaaagacagggaaagagccctccagggaactggcatttgttgtggcctgcactggctggttcctggagtaggatgtgtgcatcattagccctgcatagcacagtagctgtgaggaagtgaccgctcaggtgttgggtgatgtgtctagggtcacattgcctagaagagtggcagggctgcgcttgctgcaggcttgcttgatcctgaagccctggttcctctcaccatgccctgggctgcagaactcacttctgggccttgtaaggccgctggtgggtaatggtgacagtgggaggagtaatacctgaacagaggctgccctaaataatggcttgtggtggtcagcgcctggaagccctgggtgtggttccctgcagaaaggaattctgaggcctcagaaatgaggttttgttttgttaaaattgtcttgggcacccactctccagttgcaggtcagggcctgccctgtggctcaagtgtggggccacatggaggttgaatcaactgctcccttagggctcccaggggtgggaggacaggaaatccctccaggattgtttagttcagcaatactcctccccacacccgtgttacagctgaggaaaggagtccccttcaacccccggcatttagtgattctatcatgtcggcatagtttcttctctgacctggccatggtgcgtttgatgccaagaatgggcagcctgagtggtgatggtcagtcagtgccactctgtcagtcccgggaccccagctgtccccgttctctgcacagcccagccttgggtgcttgcttgtggggcctgcaatgtgagtgtttagagctgccagatttgtgggggatttctgacactgttaaaaccaaacaaaaagcaaggagctctactgagctgtatgattatttaggctctaaattgggacgggttgtggtgagggacctagagtctaagaccaaaggaaagtccctggtccatggcacaggctttgaatgtgggccccaccacctgagagctgtgagctttgggaggagctcttcatccagcccagctgggagtggggatagtaaaactgtttccccagccgggagtggggatagtaatactgaacctggcagggctgctgttagaccatgggtactcagtgcagcagagtctctgtaaatggcagaggtggtgctttgcagatgggagaagggaataaacctgtagctgatgtcaggccctttgttgcaccctttataccgaatgaattatttcatttcactccataacacctctgaaataggctacactgttcccatttgacagacaccaaaatgagtttcggagagtttctgaaacttgtccaagttcatgtagcaaatggagtttaacttccaaattctttccaccttgccatgagaaaatttccattcctgcagaagatggccttctataaagggcaccgaagggatttaagtcacaccttgggacacattcctagatccaagtggtttctgtatgttataggccagacagtagcaaatgcaaaggtaaatttatgtgcctgtggagggggagaattaattttttcccctccctggactttaactctggaaagcttaatcttctaaagcttaatctttagaaagggctcagaaactctgcttggtgcgcataataagtgttgtgtccccaaggcatttgttagataaaacgaaaattaaataaataaataaaatgctaatcgtgccaccagccctgaagtctccttgtctctgctggcttttccgtgcagaacgggcacagtggagctttgttcttctgcccctttgtccggacgaggcctctcaggggctggctcacaggcagggaggccaggctgtgcccgcccaggtttcccaggccccgctgcctccaactctcactggcctccttttcccgagggtggggcggccccctgccagtggattggaggggtgctgccttcccccttacccatttgtcccagtggccaaaaggggctgaaagcaggtagctggaggatgcgggagacgtgtgattccctgtttgccagttggcctaactggaatcttcctgaaatcattgtatccctgtgagcagacagcaggcactatgggctgtttggccttgggttcgcttcctgccttgggcagtctgtggaatggggcccggtcctcaagcacttgtggctgtcaccagcaggaagtttgttcagcaccgtggttctgaaccctgtcctcatgtttgaatcatgggtgcttttaaaacacatccatatcaggagcacagccctgggccagctgacttagtacctctggggtgggaactggcccaggcatctctatatgtatacccgctccaagtgattctgatacacagggagggtggaaagcccctggttaggatacccaagctgaaaggactgctcaggagttgcttgttccacccttcagtttacccatgaggacagtgagttgacaaaggccattcctttttttttttttttttttgaaacagggtctagctccattgcccaggttggagtgcagtagctcactggagccccgacttcctgggctcaggcaagcctcttgcctcagcctcttgagtagctaggatcacagggtctagctccattgcccacgttggagtgcagtagctcactggagccctgacttcccgggctcaggcaagcctcttgcctcagcctcttgagtagctaggatcacagacatgagccaccacgcctggctagtttttgaatttttttgtagagatagggtctcactgtgttgcccaggctggtctcaaactccctaggctcaagtgatccacctgccttaggctctcaaagcgtggggattgcaggtgtgagccaccacgcctggcctgcaaaggctactctgatggaggcaggtgggttagaaccaggtctcctgacgtctgagctcccaaagcaccacctgttgccctgttaatccacactctcatggctatgggaaaggcaggcagttggaattatgatgttgatgataaaaatgtctgcttatcacccatgctgctagggagaccaggcttagttaggtttactttctctgttctttcctttctcttgcacatatttaccattgcatcttttcacatgacatcacaagtatttattttctaggccatgagttctcagaggtcaagttctggataatggctgggtttttgttacagccattcttatacactggtacctggccagagcaagctttcaataaatgttgtggagtggaaaggtggataccagaccccagccttgagcccggtggagtgtctctctgagcccctgggttaagtgggtcaaggcaactaccctttgcacttggggcaagttgacatgaaaaatccatagacaggcagagtcaggaaaaacaggactgagaaggggctatgaacttgatcctaggaatactggcttacttgaaactaaacaaccacgcaatcctccacacagctttggcccccgctccccgtggccctcccgcccagctcgcctttgcagtgagcagatccagtatacatgtcacagctggaatctggcttgtgtttggaaataaacaacttggcccctctctctgcctgggattttcctttatcaggagatgctcatgagccaccaccagagatgaggtgtttctttccagcagagatgagatgttcttttcagcagcctgcctgagagctccagggaaaagtgggagggctttgtggtgggacaaacaccttcacattgtccttttctggttggtattggagagggcttgagtgagtaggctggatatgaaataatttgaggggtggtgaatgcaaaggactaatccaccaaccccccagcaagtttgcaatgagggaaagtctctgtcttgcaagaggagacaccatagatagaaagcaatgggtgcaccactctgaatgctggctgcccagctaggttgctttttgcagggtggtctgtcctcaggcagcagccagacaacattttggggagagtagctcaggggattcctgtgtttctgctgtagctagttcagggtactaagaaagaaaaaaaggatcctgctaccatcatgttaggtagaaattggcagtttagaaatacagcatggggaggggcctcctctctcacacagggccctggggagtgtaaattggtacaactactctcaagagaacttgactagatgtggtgaagttagggatacacataccctatagccaaaaattttacttctattgtctgtactggaaaaactagcatgcaagtgctcaaggagaaatagatgtacattgtaacatttttggtgatgatgaaaaactagaaggaaactaaaagcctattagccaggaaatatatcaataaatgacggtttacacagtgtagtacttttcaccagttccatctgacttacatgaatcagcccgactacatttaagaaaaacgttggtagaaaggttgcagaatatctgtagtaatgataccatttctgtaaggttaaaaaaaaaaaaaaaggaaagataccatttttgtgtgtttgaattatttagaaaatgagagacatgttgctgccatcaagttgctcgcagtctaatggggaaagttggcaaataaacagctggaggcttccagatagtgaatgttgatgttattgaccaagttccttgtcttgcaagacatgaccagtttggaggggatattagataaaatagagttcaaataacagtaactcaagcaagttaatttttctcacacataaaagaagtctggatgtaggtaacccaatgtcggtgtggtgggtccacaaagtcattaggaactcaggaaccttccagctcacccttctgccattccttatccttatgttcctagatggctgctggaggtccagctttcacatcagctttccagggagcaggatgaatgaactggagaaggatgtgtcatgtatatattccttttgaaattaccatgtggcacttccatttatgtgtcattggccaggtattagtcacacagctacacctgcctgcaaggaaggatggaaacgggccagctaaaacctcagcattctgttaggaagaaaggagagtggaaagtgggaggccaccactagatgatgaaagatgagatagtgagtttgggtacctctggcccatgcaggctggccatccatttgggggttagattggggctggagcttatgagtggagtggggttcagagttttctaaattgggaggcataagcgtgtaggtgattgtgggagtcctgggaaggaggctgctgagttgtcagaaaggtaggagaactgggaagctaggggtgggcatgtctgggaggagagaccacttggccagatgccccagtgaggtcaagcaggatgagggtgggagtgagaacatggactctgggggcttctgcaagagcagttttggtggagtagagagactaagatcaatggaggagtaatattgaacagctgaggaaatgtgtcaagatctttgaacttgaagggaatgagagagagaagggggagctgaagagaaagtatttattaaggccagaaagatttgaatgcaggtttggaggctgaaggacagctagatctcccctccccatccccttcccaaggagggaggtattgatgggaggtgaggataggcaaatccagcaagtacaggccggtggcctccagtatctctgcaaaggggcttgtagagcatgaaactggtaagatgctgccccaggaattggggaagagcaaggaattagatagaatcaaatcaaagagctgctaagccagaggaagtaggtcaaaacctaaaactttggatgtccccaacccacctgcacattgagttttctccagtagcaattataggagcagagaaaaagagattacccaggattagaaggctgcaggcagagcggcaggaaaaggcagggagggggctctgggttcctggagtggcagtggtggtgtggagttcaagcagggttatattacattatgctgtaaggtggaaaacggtggggcacattttagaaatattcccattagaaatggtaagaaagaaaaaatcttatgcccatgaagttgtaaatgtcagagcattgtctcatcattactgaaaatgtgatcattctagacacacagaattgtgctctcagtcacccgcatcagtccttctgtatattttgagttgcattaatttgcaggccacttatttaatatgaaactgtgcctgcttgttacttggtagcagacctgggagccaggtggcctgggttcagattccagctccgcctcttacttactgtgtgaacttggacagggctgtgtacagtcaagcaggttgtgcactgcacaagggggtgaagggttccttaaatccagactgcccctattgccaggaatatgccttttgtgggtctgtgctgtgtctgtgcagaggatgggatgcactctttcaccttgcacaaaggcactgcatgggttggttctggctctggctttgggcaagttgcctctgtgcatcagtttcgttggagagaataaatgagttaccgcatgtaatgtgcttggaacagggcctgacacatggctaagaaccatggtaaggattaaatgctgattatatgtagtactggaatgagctgagccttctgggtctcctctgaaggcttatcttgagtttcccaaagcctggcatttaggagaggatacagctctccaccccttacagtttggtcactgagtttgcattttttcccaaaggttccaaaggtttccagaggttctctctaaaccttaagcttttccaggttgcagctgcttaatcttcaggcagctgaccttggtgttcctggtgccttcttcatctgaaagaggatgaggtagttggggccaaggacaccccgggtagtctagcaagatttgcccttcagacatttgtgtaaatcttctccctaaacatcaaactggagaaatacaggtgtgctatagggagaatgaaaagagccctttccaatttggaacagtttgcgtggaaggtggggccttgcccctatggcatccagatctgttcggtaactgcaactaacttttcttttcttttcttttcttttcttttcttttcttttcttttcttttctttctctctctctctctctctttctttctctttctttctttctttctttctttctctctctctctctctctctctcatggttcttgtatgaattctaattaagagacattacattcagaattatagcactcatggtgataattttcagaagactgtaacagcttctttgccacttaaggggtacaaagggtgcagctgtttccctgaaggaattcttaagttagtgactactaccactcaaattttcctagttgtcgctctgttacaggttactgaccgcaagtccatgttccagacattctttgccaacacaattaattacaagagagccacccccaaagtcttagggtgaattgggaaagggccggttaaatgaggaagcaggccattccttggtaaaagtttgtagttttttttcccaatacatcttctctttattgagaacttcatttttatcctgtgttcctcctctgccatctcacactctcgctctgtctgctggattttggccacaatgcacctcattcatttgtatcagttgcaattgtaagatggacatttgttgatcatgttcagtcctcgtgcatcttttttaaagcaccttcctgagagattttgctcatgtagtttttattggctgttattctgacagctgaacacgagggttcaggttgagaggtcctctcacgtgttggaaaacgtatgaactctttctcatcatcgcacagttctctatttgaaacagcaaatgattcttgggccgtggcgtggtatttgggctcctcctccggggggaggggtggaaggagtgctctgcaggaagtagagctgctccagcagcatgctggtgatctccttccctaggacttggttactcaggagggggctgacgctccctttcaccttctctctcctttcatgggccataattgttttagtccaagccttgatgttctcccagcccttcttcagctgtttgaaatccggcagggacagctcggctgagagttgcattcgtgggtcagcgcctgcaggtacattgattgcttaagggcaatagttcacacatcacttttcttacattccagcacatatttgtacttttctactaaaatcagcagggtactcttttctagttctgagaagtatttggcaggttttataatttcattgttttgcattttccactatatttcccctggccgccagctatcctgtaatcccagctacttgggaagttgaggtaggaggactgcttaagcccaagaggtcaaggctacagtgagccatgtttgcaccactgcactccagcctggataacaaaaggagacactgcagtggcacacccgccccccccccccccttttttttcttttttgagacaaagtcttgctctgtcacctaggctagagtgcaatggcgtgatcttggctcactgcaacctccgcctcctggcgattctcctgcctcagcctcccgagtagctgggactacaggcaccagccaccaagcctggctaatttttgtattttagtagagatggggttttaccatgttggccaggctggccttgaactcctgacctcaagtgatccacccaccttggcctcgcaaagtgctgggattacaggcgtgagccatgcccggcctgacttcttgtttggggcacaaatcagactgtataagaatcatgagaaaaacaataatatcttgggctttcaccaaatgttttatcctggtcagcagtatctttagaagacacaaattttcatagtttcttgattttaggatatatttcatagtttaatatttctgaaattgggaggctttgtacgatgtctttaatgtagtaattctttgctctccccaaatgctgttattacattgattatgtgtctcataaatgaacatccctacctcttgtgggtcatccaggatggaatttgttttattggtcagtagaaaaggctatgacctaattagtgtatcgagtaggtattctgtgtaagttaatgcatttattttgttttttattatttttgagatgaagtctcactctgttgccgaggctggagtgcagtggtgccatcacggctcactgcgacctctgcctactggggttcaagcaattcttgttccttagcctcctgagtagctgggattacaggtgcgtgccaccatgcctggctaatttttgtatttttagtagagagagggtgtcaccatgttggccaggctggtctcaaactcctgacctcaggtgatctgcccacctcaacctcccaaagtgctgggattacgggtgtgaaccactgtgcctggccaagttaacacgtttagtctttaacacatttggtctttggaagaaactgaagctcaggaatggatcagtaatttgttaaaggtcacaccgctagaaaagagtggatccagtatgtgagcccagctctgtctaatcatgatgttcagttctttctccttcccaggagagacctgtacttcttcacttctggctcctgctgtttttttaagctgaggatgtcctcttctcttcctattgaaactccatttctgggccaggcatagtggctcacgtctgtaatcccagtgctttgggaggctgagaaaggaggatctcttgagcccaggagcttgagaccagcctgggcaagatggtgagactctgcctctacaaaaattaaaataaaaaaagttagctgggtatagtggtgttcacctgtaaccccagctactcaggaggctgaggtgggaggattgcttgagcctgggagtgtgaggttgcagtgagctacggtcatgccactgcacttcaccctgggtgacaagagagaccctgtctctactggaaaaaaaaaccacaaaaatcccaaaacaaaacttacaccacctgttccccaaaaacctattggataaaaaaactccatttattattctttcagtttggataacattttatgattataaaaatgacacccgttctttaaaaatacaaaaaagtaaataataaaactttccagtgtttacattttgagatgttaattttgctataaaaatagaaattgacctcaaagttgaaaaaagaaaattaatgccttaaattaaaataaaaaagatatgtgaagatcatactgcaaatgtagttttcttaccttgagttgttaactttctagaagattatgggcattgcctcatatgattaagtacactgttaaaagggacttaaaaaaaaaaagttgcctcatagtgttctgtgattgacacaccagaatgtagttacctacttccccatgtttggctattttaagttacacttccgtgaataggcttatgcttacacttaattgtttctttaggataaattcctagaagtggagtctggctcaaggggtgagggccacctggtgaggcttctgttgcatcatcctgtttctctgctgccctccaggggggcgatgccgctccacgctcctgccatgctcctgccacagccacactggggagtccctctgccaatgttgccaaacatctgcccatatgtttccattttgtatttccttgcttattattaaggtgggaggtttgttatggttgccggcagaggtaactttcctttgagataaacatgtatatttccttggcctgtttaactgacttgtttgtgcaaccccagtcattcttcaagacccaattcaaagctcatcttttccatgaactctttcccgacacccgtcttttctctgaagctggaagctttaattttcatatctgaattctcacagcctgtgtgtatctgaaaacccttgtcaaagacacttttgcattgcaacttgatatctttggcccccacttgaatctgaggtctttagggtaggagatgggtcattcatttctgtgttgtttgcagggccttggcaccatactgggtaactagtgggtactcgatactcttgaatggatggatagatggacacacactgttcttaacaaaccaaccaacccatcccacacccgtcagcaaaatgagtttaatgccaccttatgaaattgctctcttcctttccgcatctttgcctttggaatcagtgaggttttgctccatctaaagacccagcaggggctgggcgcagtcccagcactttgggtggctgatgtgggtggatcgctggagcccaggagtttgagaccagcctgggcaacatggtgaaaccctgtctgtacaaaaaatacaaaaattagttgggtgtagttgtgtgtggcagtggtcccgggtactcaggaggctgcggtgggaggatcgtttgagcctgggaggtcgaggctacactgagccgtgattacaccaccgcactccagcctaagcaacagagtgagaccctgtctcaaaagaaaaaaaaaagacccagcagggcagatggagtaaccagcaaagccgaccttagtggtgaggctgggcatggcggcctgagcagggatcggctccaaatagtacgtctaccgtgggctcctggacctttctccctttgctagaagagaagcaccagcaccctcccttttcctcttgtgacattttaaaatgtattattcccattcatagccttataaaatcagtacgcagtaattagagaacatttggaaaacacagaaaagtagaaggaagaaaataattacctatagccttcccactcagatcagcccattcacagatgacatttctgctgtgttttctttcagttgtgttttccaggcaaagactttgtgtgcgaggttttgcttacgtagttcttgccatccatcatgtagatttttttgtcctgcctgtcgcttagtaaaataacacaaaaaacttcctatgtttttgtaaacctgctcagtggctctgtcatagtttagtaagtggttttaccatcacctccttagctgtgcttccattgttggggctttgggttgtttgcactgtgtccctcttgtaaacaatgtcgggatggacaagtttgtgctgggcgtttccttgtccctttggctggttacctcaggcagactggcccataccagcccttccccgcttcattctcctcccttggggccagtgccctattcgcctctcggtttgtgtttctcagtctccatgtgtagcaatatgttgagaaacagcttcctttttcaggaagaaagctcaagatgttgaacctcgaggaggctgtgcacaaaggtgcagagtcctgcctgctgggtcatggccttggcactgcagggcggcccccttctgcctcacaggcccagggttacagaaggtgcaggtgacggggaggccacgcctttgaaggggctgcctggcaaaccttttcccctgacagtaagctgagggggtggccctggtcacatgttgcaggtctctggagggggtgtagtgaatacctgagtccattttctgcctggtcccacactcggatccgtcatggaagatctggcccctgtgttctgtgggcgagtgcttgggggagaacccctcctgtggggctgctgagatgtgtgctgtgctggaggtggcttcagccctgctcctctgagcagctgcttggggcatgctgttgagctccagagagcacttcagcatatagccagcagcgccctgaggagctgcagtgacaaaggccactgtggcactcaaggctcaggtttggatggtggagtaacattgcctaggttcacctcccaccctggacagttactttatctctctttcatctccacttggggatagtaataacacccacctccccagatgaaatgagttagcattttatacacttctcaaaacagtccctgtttgttaaataaaaatagggaaccagcgttaccagctagaccactcgctcacagcaggttgaacccaggacttctgccatccagtatgggggaaagagtgctggacagaaccaggagaccgtcctggcactgccttctactttgtgtgagtttgactaagtcgttgtccctctctgggcctcagtttcctcatcagtttttcatctatttctgtgagatgaccttaggcccttcttgtcttagaacatccaaggattttgtaatttaaaggcatttcagacatctgaagatgggtctggtcctgctaataatcctcactggttgacgtggtccttagatggggccaattgcaaaggtcagagggcaggagatgcagagccctgtggggtttgcccggtttttctcagtgcgggtgagctatcctccacctggagggttatggtagctgggtcacctgggaacaggccgtgggagaactggcctccttgggaatgtgttgtcctgcgcggcagagcactttcaggtacgggctgctctgtgaggccaccctgtgctccagcccgcagcacttgagactgacttgccctgaggtttgtgtgagcgaaatcgggtcttatgcaacagtgagtgcgtgcatctccgcttcgagctgttacatcagaaagctaaacacagagagcccttgcaactggagaactagcaggaggccctcgctctggttctttgtcagcgggtgggacggggtaggatgtggcttacaggcagctgtggaggagaggactgtgctaggaaagaggttggagctggtggactctctcccaggcgctgcttttccaacaggctttctggaaggttctggcctccttctgatcaggtggcagagcatccctggggctcctcaccagtattcgtgtgctctgggtcagtgatgtctccatctgcatcactgctggtggagcacagtgggaaaggtcagccttcaaactgtggaaggtcagacccagcgcctcaagcctggaggggcagcgtggggcatcagcctcttatgagtttaagttggctctgacacataccagctgggtgacgttgggttggcttcctgaccctctgagtccttttttataaatgagaacatttgtaccaagatgcccagcattggcctgatggacagtaggcaccccaaaagtctcagtcatttaaggaagtaatgtagcccatggttaagagcatgggctgagcagctgaacttcctgggttcagtttcttgctctgccacttactagccgcatgacatgggactgttcctcatcctcagtttacgcctctgtacaatggggatagttgtgatagggcgtctctcacaggtttgttgcaaggattaagtgagttaattcagttgtcccttggtatccatgggggagtggtcccaggaacccctgaggataccaaaatccacagattctcaagcccccttagtacagatgcagatgcaaccattcttttttttttttttaagatggagtatcactctgtcaccaggctggagtgcagtggcataatcttggctcactgcaacctctgcctcccgggttcatgcaattctcctgcctcagcctcccgagtagctgggactacagatgcacaccaccatgcccagctaattgttgtatttttagtagagacagggtttcaccatgttggccagaatggtctcgatctcttgaccttgtggtctgcccgcctcggcctcccaaagtgttgggattacaggtgtgagcccccgcacccagccgcaaccattcatttttttaaaaagatttctgatctgccgttgaatctatggatgcagaacccacagatcctaagggctgtctgtacgcataaagcacttaaagcagtgtctagcgcataatagtcacccttgttggagttagctgtcattgtctaatttcttcaataagggtggtcagttgatttcttgagagcttggcagcataccgcctctctttattttgagatgcatccccaccctgttcagctagagcttgtccaaggtgacaggtgcgtgtgcgcacgtgtgtgtgtgtctttttcagccatgtcaccactatccaggtctggagagtagctccccttgcagcctgggggccaggcctctcctcggcttgcttcttcaggctgtgtgcatcttgttacccatcctggtttgcctccctcttctgcacagactgtgctcagaggttcgtgttgcacagtttggctcgggtgtgcccagctcttgacctgagaataaagtaagggccaggaaagccatcctttcagtgtgagtgtgttccagccacgcctggccttgtctacgtttgcccattttcaaggaatacaccagggtagcttgggacatgccatgtagatggagtcatccaggaatgtgtttaagaatcttaaagcaataaacaagtcagactaactgctttcaaagagtacaagagactggaattttcatgatagagatggctgacaatgagtgttaatctattatagcaggcctgatgtcttcagcaatagacatccccctcttcccccattttgcagataaggaaactgaggcagagggtggttaagtaatctgagttaaagcagctagtcagtggccgagctgggatttgaacccgggtctgttggcctctaggccccagcacctgactatccatcactatactgcccctggctggcattcctgggattatacagcagcggcatcctgttgcctgagccctttctcatcccccgctaatgatagtgctagtaatgtgagtccagttacagctgtgttgcctgaggtgcacagggcctagggggataactgcgttgtctttagccattgcttgttagagaaggtggtcttgccttctttctccctcccagagctgatgtcacctaaaccctgctgcaatattattcctgggtttcaggtctgatttttatgtcccctacatcccatatctccttcctctgaccagacaaaatggtccctcaggaaaagagctttgaagattatttagtggagatggctgtggctaatcagtgaccttctcagatcgcttaggaaaagcgtgtggatgtccttgtcagggctttcttccctgagaggcatctgagaagtccctggggtcacagctgggagtgaccctgggtgggactcagtgtttcaggggtgcttggttttaatctatgaatttaaaatcatgctttcctgggtgggagttggggtgggcagtggttgtgaagctggcgccacaacataggatggtgtgtagccttggccatgtgcctttacccctgagccttggtttgcagtgaggatcagatgaggtgctgtcttgccagagcgctccgtaaactctgtagtgctgtgactgagtgtgaggtgctgcgaccaagtatccataagatacacaatcatcacattggtgtgcgccacagaaagaatgcacagtcatgtcactaggagtaattctggtctcatttgaaactcagcatggtggtttggtgccagaggtgttccttgggcctctggtacaagtgaattgttaaaagggtgtggatgctgatctgccctaatgcatagagcttcatttcacagccggttgctctccttgttccacgggaagcttgcagacacattaacagatcaacaatcgtgatccttcatctggacgctttccttctgcactcttccccagtcacccgtcctggttttcctatcagctgccaaaggcacagctttgatgttaagattaagattgcagcgaaggaagatgggaaggaatctttgctgggagctcgcagtcagccagcagctgtgtcatattgttttgtcttcacagtgatcttttgaggctgatctttgcccctcatttatggcagaggaagtgaaggctcagacatttaattgcccatgggcccttagctggtaggagtcagggctgagtttcaaatgagaccagaattacccctagtgacatgactgtccattctttctgtggcgcacagcaatgtgagagggccctgtggggtctggccatgatggcagacactgcctctctcccattgctttctgtctgacccacctccacgggtgtggggaagagttggagatggtactgttggagcagcggcttgtgctgttggcaagcatagggttcccctctgtctgggagacagggcaggcacagcgctgaagtgagagacggctgggctggggctgcctgtgggctgagtgccctttgagggtggaatctccagccgaagggcccctccccgagaagcaccaagtcctagtaaattgaacaacaaacagggctctgcttgggtggctcatttgctggagaaactcagtgcttcaccttcctgctaaagtatgccggtatgccagaaattccctggacaagcaagaagggaagtcatgtctttatagtaaaaacactaataaaacagctctagaatcttctccttcctttacacccacactgccactaactaaattaccttttgttctcatcgtttgctgaattgcagtgcttcttaaatgattttcctgtctttggtttatccacacgcacttcagtctgtcctccttatggtttccagaatgaggatcgttcagaaatgcaaatctgatcacgtttttcccttcgcttcccgccccatgcctgcaagattgagtgcagatgcctgagtgtggcattccaggaccttctggaactttgtaggacctgcatgaactggtcctggtccctgactgaaacaaaaaaaaagtggcaccggccattgatctggagggtctaagaaggccctgctcatgcacctgaccctgggtggggaccattccatcaggggcaggcccagggccactcattatggtctcttcatcacagtagtcaggactctaggagactctatactctgttggacaaagtagccacagaccaacccaggttcaaggggagaggaaatagacctctagattggaggagtgtcatatactttgtggccgtcttcaatctgctgtggttgtctacactcgtatggtagactcagatgatcctgtgactacccaatggggaagaagaaccctcaccacccactgccaggagcgggggctcccccacctattctttttctctagcaaatgcaagatcctacatagcctgctttacccccacccttaccttgtgcactctgggaaactgagtcatcatgtatcttcctaagtgcagtggtgcagctgggggttgtattcccaaacactcagcatcaactgaatcagggtagaacaaggattccatatctccagctcgtggcaaatgtttgtctgtattccaggtcttatataatagactcgaaggtactctaaggtactgcatgtggtttacagtatgctagggtcctttttcaaggatatgtaactctctcagcctcagtttcctcagctgtaaaatgagattaataatagtacctggctggacgcagtggctcacacctgtaatcccagcactttgggaggccgaggcggcagatcgcctgaggtcaggagtttgagaccagcctggccaacatggtgaaaccccatctctactaaaaatataaaatttagctgagcgtggtggcgggcacctgtaatcgcagctacttgggaggctgaggtgggagatcgcttgaacccgggaggcggaggttgcaatgagccgagatcaggccactgcaccccagcctgggcaacaagaacgaaactccatctcaaataaataaacaaacaataaaataaaaatacctatcgggattcatgtaggtattaggtgagataatatagaatgtatagcatgatgcctagtacctaggaatgcccagttaaaaagaatatatccagttgtggttaaaacagtcctggaatacaaaaaataactcaacgtgcatcaaaaacctaaataaaaaagatacaacaataaaacttctagaacccaggagaatatgtttgtgaatatgggcttgacaaatatctcctagataggaaataaaaagcacaaacaaacagacaaaaagattgttaagttggacttcataaaaattagctgctcttcgagatttaaggacttttggaagaatgcttttggatggcatgtggctcaaagaagaatgagggataccttctttttgctgttgtaggttttctggaagccagcaggaagcctcagccttagaaacattagcggtagaaggaggtttggaatactgcggacttaatagaactacttttggttgcaagtaacagaaaatgtgactggaataggccattatgtttctcctacaatgagtctggagttaggtggcacacgtgtgctggttttgcagctgaacagggatactgtctctggttttccaggcagctcttgccatccttgtggttgcgagatggccactgcagcttgtctgttttcaaaatgggcaggaggtgttgggcagccccaagatctgtcccatgctttcccagcaggtcccctagcaagcaagtcctcatgcctcattagccaaaactgtcacaggtaaccagcttcaagggaagctgaaagtggggactgaatcatcatgatggctgtgcagggaccccattccggatcaattatgtcacactcgctgaagccaaggctcgtgggttgtgatgtgaagactgggctgcgagccactgactgagaccagttcatcactgggcacagtgctaccctgaacaaaactgggtcctgtgggcaagggagaagctgggagctgatattaggtggagatgagcagtctgagcatggtgctccacagggtgtggcggttcgggcgcccctcatccttctgggggagttcacaatgcattcattgatccctggtgtctggggcactcatctgtcattgccccttgcccctgtccagccctttgtccttttctgtgatggcctgagttgctaagccaacagtcacatccctggaaagaaagccctctatctttccagcattgggcacagtctccttctcatagttggtgcatataggtcagagtttaaggtgccttgccttccccatccctcccttccagagtctccctagggaacaggccttaaggataggtaaggggtttggcccattggcagaaatctacttttgccattaggtgcagcctctgcctttttcactaggcccctgcttggtaattcacacccaggtgcctttcagttggcaatgtcaggaatactccaggattacctgttgtgattgaggggttgagctgagggggtaaactagttcgtggctgtgccctgtgggcctggtgaccttcagacaaacacatggagtgtgtgtttgaactgggacacaggccgtgttgatgaagtatctggtctgtgagcaacaccacacctgtggctcctgacacctgggccagcacttccctcagcctcccagcagaagcaccgagcagcagggctgctgtgtcatggacgcttagacctgctgtctgttgctttgcctttcctagccctcggtcaggtgtctgtgcggacacatctgttcccccaacttgtgtgggttcctgaaaattatggacccctgccgcttacgaccgttgtccttggagtccaacggtgccgggcattgggaagaggtttggttgttgaatgactggatgatggtcagaagtcctttgttgccgttattcaattgcttcaggcacaggggagttagggggtaaagtgggtgtctttctttctcatgatttagtcctgttggtccccacagcccctaaggactgctggtactaacaacacatgagatattggggggttacatcaattgaggcaggaaggaaaacttgaaaggcagatcaagacagatcatttactgacttttcaaataattgctttctgaagagcagtgttttgactcaccttggctttgcaggtgggagctgtattaggctgttaggtcagggaaatgccttcctctttggttctgctgcatctcacaacctccgtggcacataaaatggcctagcagttgttgctgagaaaactcgggcccttggccattcactctggcccagctcaagctttgcatttcccaggaagcatcatgggtgcttttaaaccatagttgacctcatagtcttctttccctgactgctcatgcttagtactggagcagtgggaacaggtgatttatgtgatttatctaaggtgggtgcttagttgcacagaggagctaactcatcagtgcttccatacagggtctcctgcacccactgctgcaccagccaaaggcagtcagtcatactcttagacaagtgagctcgttttgtctcagcctggggttgaatctcccatctacagtctgttgtcaggtcctcagactttgcattcccagtggagcatagggaagggtaggaggccctgagctcccagctgtggccgttctcacccctggcctccttgggaatatctccacttgtggtctgggttagacttgtttgtttgtgtttgaagttccccgactctgagtttgacgtcaaggcaggattgctagtgggaggcttggcggggaggttgtctctacacaaatgtaaaagcctggcagcttccccaggagagtgcgggtatgggccgggccgggagagggctggctgttgcgaaatgcccagctcaaggattgaggtcacttgtactttctcctctccttgccccactttccctgtgtgcctctcctgctctgtcccatgcccatgaatgtcagcccccgtgggcgcccttgagggctgggcagtgctgggagccaaggggctgcctctggtcccctcggagctgggtgctatggtcgctgcgtgcctgtgcgtggaactgtcagctgcatcacaacctccagaggcctccttacattctcagaaatcattttgcaacaagttggccatggcagccaggctagactgcttagctggctgggttggtgggaagtccccagaaatgcactccagctttgggaaggaagtggaagatgtaaggggagcttccccgaggcatggacagaatgggtcaatagtggaggaggagcagcagcttcagggaccactggaatgaaggctggagtaagttgccagggctttggtggcatcctgaagttcgggatggtatagtcagggacttggcaggagcaaagactgctgtgggcaccacgtaagagtctggtgctgcctactgaggagaaaggagtcagggtcttgtgggtgctggtgagctggaagctggtccacaactgcacctgccacaggaggactaaataaaacaagaggcaagtgatggacgaatggagtggctgtccagttacttcgtgtcactctgtaaagcatactaggatcttcttaaaagggatggcctcaggttataggcagcatgatggctagttttaatgaatttaatgctggcttagagccaggggtggggtacagcccagagggtaggttattgcaagtcaggaccagaggtggtggcccagttgggtggctggatacatttagagggtgtgggcaagcctgtggctcttattcacaggattcactgcctggaacagtctaggcgtggctggattttgggctttggatcgcaaaagaggtagaccctgcccactgccatcctgcttgtaccagtcaagacagcttagggtgtgggttgcaggagtcattattttgagaggtgcatagagagcattagattgaggttggaatcccttctttaaccacaggattcaagaaagttacaaaggctggtgccttggtttcttcattgtaagatgggaatgatgaagtacacctttaagtcttgtgggtttcacatgagaggtttcatgatttgtgagtgacggcaaaggatgagcagtgacttgtcatttggctgaggctggactcgatggcaggcatgcaggtgagcatccctgagccagtgagtgagcccagtgtgctgtccagcacccacatcccgatgtagctttgtttttctttactcaatgttgaatacacagtacatcccatcagaagtctggaagggtctgtagtattttcagttacacatgattgtattttgtggagggaatgatgtgctttagggacattgccagctttgggtttgtgtgtgaagattgggacatcagtcacccttgtgctatcagggatctactctaattcctagcctctgaaattttcactgacaatccaggtagaggaagtgatatggtaccatacataaggaaaagattgttaacactactaggttgacaaatgagtattgacatgattctgtaactgagggagcctgctactatacatgggaaactggtgtccatgttagcctgtgccttggattcatttactcatttatatgttaacatctgtgacatctgtcacaacagatttaaccccctgccctgcttctgagacatgaagatctgggccactgagagggtcctgtggcagccaacgaccaaagtcagggttagggtgacaacctataataggccttggcatctggctgctaacatagccaagatcatgggtttgagagttgcccacagaagagatctccccatctcaggccctgcaattttagggtggagctgactttgtttgcaaagtcagtcgtctggaaagaggtgttttttgcaaaggtgcaaaaaagcctgggtggggtataatccaaacggcacctgccaaaagtcttcatgctcctccttttcgaggtcattctgcaggctgagcaggagtaacactaacagagttctatttagtgagcactttatatgttctggacattggactaaacactttgcatacatgagtctgcagcaaattctcagcagtgctatggggcatgtattatattttctctgctttacagagaaggagactaagatgatatgatctagatcctgccacacagctgatgtgtgatggtgcgaggggtagagcctcctggctgccaaacccaagcttctcgcagaggagatgggaccactaactaatggtaggcatgacctctgaccagtcagaacaggtgctggtggtaaacaggaggcgtggctcatctgcctgtcactgctgcacttccagccagtccagcacaatggctggcctgtccctgtccacacaccctgtggaagccgcccgtgggagctctctgtctagactgccattttagctggtgctaaatggtcttgcttttagaggcaaggcagctattgctccagctccactgtggcagcctccaagggatggttggttctgtggccacagaggaacccagcctcccaaatcagactggcccatgggtaggttgcctgggacagccatgacacaccatggaggatgggcccaggacccatgctatggggcaccagctatggagaggcaggttggggcgcagtgtaaaggaaggatgacaaggaagggacctgcagggtaggggtgtgaggcctccatgttcctggggatccctgcagttctgggggctgtgtcctttacctgaagaagtctctttcctcagtggcacgtgcttctccttggcacagtatctgctcaaccaggcccgtgctctccagggatgtctgacaagcctcaccaccatccaagtgatactcgtggagcctccatttgggaggcctgtgccagagtcatacccgagcagctggggtggcagatgacactgaggctgatcaggatgccaggttacgggtgcagatgttcctttgggcaagtggagccgatgtcatttcattcccgtcacatcctctggtgctgaggttggaggtgagcactcaaaggaggataggattgggttccctggagtcagctgggtgggtacaggtcttggccgtctcgcctttagaagaaatatatctgatgcgtgggttcctccagcattgtcctgaagtcaagaccagatttcagggtcttccttagtcccatctctgacacgggcagattcccacccatatcttctgtattgcctagggaggtaataagagagaacctgtcggcttcgcctgagaagaacaccacccacgtccgctgccgccgcaagagtgttttctgtgttccacacgttttgctgagcactttgcattcatatttttctcatgtaagccttcacaacagccttttgaggtagatcaaccccattttacaggtaggaaaagtgaggctcactggttagatcccatggctatgttcacccaagggagtggtgtcaagggactttagggctagagatgtccttcatggagccacactgactcctaggtatggctggataggacccgtggtttgttttttgcttgttccaagcactttgtatacggcaactcacttggcctcaacctccataaaatgatactctttttataggtggtaagactgaagctgagccaagggggatttccccaagatctttgattttagatgttagagctgggactagagctgagctccttcggccccagatacttagtgagcgcctgctgtagtatcggtagcacccaccaactgtttgtggctgacctgatactattctctttctgtaagtcagactctggtcagggctggggtgggcccacagtacattcttgaagcaaaagaatattggggtgtgagagatgttggttccagcccagggcctcccctgtggccagagacgtaatgactctttccttcttgctgctggtcccatccctgaaaccccaggtgcttgtctattccggaaaatttatatcttgcggttttgtggttaagagaaaatgacgctaccaatgaaaggtccccttttaggcccccagggctgggctagcaggccccactgtggtttgtctgggaaagtagccccttggcgcttctgtgactgcaaccaactttccaagaagtgagagcagcttcatttcactctgacgggagtggctgcctgtaggccacctccatcctttgtcaaccagagaagttttgctccatcagcagaacccaaatctgtagaggttgtttcttaacaagttctgggagatagcagctgccaggacaccagacctgccagtagctgggtcgtgctgcactgcatgtcttcccttttccttgtctcaggcacagctagccaggtttatgggttatctgggtgcaaagaagaatcacttcaagttctgcacagttctacccatgggcctgctttgggctgtctagcggggatctctaccggcctttaaaaaaagaaaccgcttgctcctcttctagggaagctgtcctggcttttgagatgttcagacccctgtctcatcacttgcccagttggtgtttgtttttcgctgccatttgataaactttgtgtgcctgtctggcacaatgtattgtgtttgtgtgttcatcctttcaacaaaggttttaaaatagcaaaccaggccaggtgtggtggctcatgcctttaatcccagcactttgggaagctaacacaagaggatcacttgagcctaggagttagagaccagcctgggcagcatggcaagaccccatctctattatgaaaaaagagaaaaagcagcccatgtgctgggtgctgtgctggctcctgaggtctgctggtgaccaagaacaccagctggacccccacctcccagagtttccagcctgaagagggaagcagacaagcgtgaaaaatcagaactgcgatatgtgatctgggcagggggctggagggcttgaggaaggcttcctggaggaagtggtgtctgagctgatccttgtaggcggagagtcactgggaagagcttgcttagcaggggaccgagtgcctcaaagctgaaaagggcaggcaggttgtggggaggctggactggggaaggcccaaacgctggctcaggctaaggccaggtgggctaatctcaatgttggcctgtggtggcgaaagtcttgtgcaaatggcatatgttaggaatcactcccagaggcaggacccttgaaggccatgtgccagtgacagaagggctctagtgctgctgcttttagtgccagcagcctgacctctccagttaatgtggaaaagagtggttttgagtttgcacagctgtttgatttatagtcctgtctctggtcagccctttgaagtggtggtttcagagccgcgtggaatggagggaagggctggctgtgagaaacatggggataagaaccacacattttcttcctctggcactcctgagcatatgttttatgccaggtgctgtagtaggaactggggatatgagggaaatacggtccctgcactgatgtgtaattatagggagatctaacctagtcttttggaggtctccatgctgtagttgaatatgagctaggtgtcatcgttcctgtttacaggtgggtgaactgagactcagaaaaattaattatcttccttggggcagtgcagcctagtatatggtggatttgaacccagatgtgttcaactcagaagcctgggagctcgtgtctattgggggagactgaggcagaagctgttaactgtagtatgatagtaactccatgatcagggctctgaaagagtcacacacaacacaccaggaaggggagaggcggactctgacttggcctgggtaggaaactccagcaggtattggaggaatagctgctgggtgagtgcgtgcctggtgggcagggccaggggctatggaacggagctggggggctgggggaagttggagccctggttttggaatttgcctctggtctcactgggcgggatggatcagagtggggtaagccaggatagggcacatgagtgcatcctcttagacctgtaggataaaagctcactcgtgtgtctacggttgtgagcttcatgctctgtaggtgctccccagggcttaggttccataataggacagcaagtagactcagagtcctgaacctcagcagtgtgtttgattagcagggtctgctctgggcacctgaggggcatggggtgcaggaatgtcaggggatcagcctctgggtctgtggtttcatcagacataaaaactgtacagttgagagtgtggaattattttgattctgactcagcgctccctctccagcagctgtctgcacttgccactgagcccctagtaccctgaagggagcaggggccatgggagaggggtaagtaaccccaagggggttgaatctggctctgtcagattgttggtgagcctggggccaaactagttttctgggggaaatttcaaaaacgctgatgtggtagcagtggtttcattattatgggtctcatttcatgctcacatctctctagccacaggagttcttgacctggcgtctgtggatagaattcagggggtccatcgatgaacgtagatggggaagaaaattgcacttttattttcattaaccttaactggaatttagcatgtcattccacttgattgtaggcaatgaggcacagttatcttaacaaacacctgtgactcggtcaccagtaggaatcacagttgtggagctatctgaaaaagcagtttccacttgtcacaactttaaagttatggcagttattagatgcactgttggatgtttaatactttaataaagaagcttttatgactctatcacaggttttttttgttttgttttgttttgtttttgagacagagtcttgctctgtcacccaggctgaagtgcagtcagacaagggatactcagcctgtatctcaatatatttttcttttttttctttttatttgagacgatcactaaggctggcaggctggggtgcagtggcatgatcttggcttcctgcaacctctgcctcctgggttcaagtgattctcctgcctcagcctcccgagtagctgggattaccggcgtgtgccaccatgcctggctaatttttgtatttttagtagaggcagcatttcaccatattgaccaggctggtctcgaacctctgattttaagtgatccacctgccttggcgtcccaaagtgctgggattacaggcgtgagccaccatgactggctgtctatcacagttttcagtaatttgataaatgtgtttaaatagaattgatttcctttataattcgaagtgtgtcgttttatacatttcaaagtattgttctgtccaggtgcgatggctcacgcctgtaatcccaggactttgagaggctgaggtgggaggattgcttgagcccaggagttcaagaccagcctaggcaacatagtgagaccccatctcaaaaaaaaaaaaaaaagataaagataaaaaaagaaataaatgaaagtattgttctttgaaagagatcatgggcctccctagatttctaaaagggtctatggccccaaactggttataagcttttattctaattgaaaatttggagcctttctagatatttgaaattaaaaattattaattcatcatttttttcttcgtaaaatattgtgactctgttaacaagagtccttgctctttagaaaaatgtgctaaggtcccggtgcagtggtcctaagtgttttgttttatactcagatcaagtgatctgcccaccttagcctccgaaagtgctggctcatgcctgtaatcccaacactttgggaggcagaagtgggcagatcatctgaggtcagaagttggagaccagcctgtccaacatggcgaaaacccgtctctactaaaaatacaaaaattagccctttatggtggcatgcgcctatacttccaactacttgggaagctgaggcacaagaatcacttaaacccaggaggcggaggttgcagtgagccaagatcgtgccactgcaccccagcctgccagccttggtgaccatctcaaaaaaaaaaaaagaaaaatatagtgagatacaggctgagtatcccttgtttgaaatgcttgaggtccaaagtgttttggattttggattttttagaattctggaatatttgtattatacttaatggctaagcatcccaaacccaaaagttcaaaatccaaaatgctccagtgagcatttctttggagcatcatgtcagtgctcaaaatgttttagattttggagaggttcagcttctgggtctttggaagcgtttcggattttgggtttttggattcgaaatgcacaacctatatttacagatgaaaggaaaaggaatgaattaacaccacaaccatgagggacagcagggttgagaagtgtctccagaagacaggttcctgtaagagactgtgaaggtggtacttattttggggggacacttggaagtcaccattaggaggccaccagagtcttagcaacatttcaggagctctccctgggtccctgggtcacttggccgtagccaagccaggcaactccctggtcttctggcagtgagctcgtttccatctgtcgagcctaactggcctctgttgggaatgcgagtcccttatttttcatcagaactgggccatgccctccttgtgcttctctgtatcccgtgttccccagtccaatgctgggcacccagccagagcccagtgtttgtcgggtttacccaagtcaggctgtccttgtgtaagcttttcttatttgaagttttagccatttgcgagtcttttgaaagctttggacaataactctagaaaatacacagacttgcatatctgaaatttgcatacatttcagggtgtggatccctgaaagcctactgggaatccgagtccaggaccctggccaatactgctgctgctcagtggtcatggctacacttgtggtgctcaccatgtgccaaatgcgtcatttcttccgtctctctgagagtcagcttctattatccccatttttctggaggacaagatggagacctttgacaagatggagacttttatagggggttaagtaacttgtccaaggtcacagagctagggtgtgactgagcccttggatcccaacccaggcagttggattcttcgctggaagcatcctaggtgggaggttacccattctccccaaaccagcaggtcttccatattagcaattaccaactccctgaccccaccctggcaggaaagccttcttttttacccgagacagggtcttgttctgtcacccgggctggagtacggtggtgtgatgatggctcactgcagccttgacctcctgggctcaagcgatcctcccaccttagcctcccaagtagctaggactacaggcatgcgccaccatgcttggctaattattgtatttctggtagagacagggttttgccatgttggccaggctggtaggaaggctgccttttatttaacccagctctctgttctgaccagtgttgcccatgacgctcatgtcctgaggtgggcagtgtcagccgccctgggtagggcagggggctcatgggtggccaccagcctctgcctgttctcccagacccttctccaccctttcccctcccctgcaaacagcagagaggagagccagccccttccctcatcacattgcttgtgtctgcctgagctcctctgtagtgtgcttgggcctgccatatggttgggctgcagatgaacacaggcttttcttttttggactttctgcaggcgaagctggtccgttacatttgtaagcagaggcagtgcaagctgagcgtggctcccggtgagaggaccccagagctcaacagctacccccgcttcagcgactggctgtacactttcaacgtgaggccggaggtggtgcaggtatgcaagctggttctcagcatagggataggcatgaggggccaagcagagggaacacacacaaacccgagggctagcttccccgtggctaagactaagggttgatgctctctagtcttgagaaggaggatggggagggacagcagcgccaggagggatccagggtacatgtggctccaacaagtgccctggatgctattgcctgatgaactagggcagccccacgctgggcattgatttgttcatcatacttacaacagccaacgtatctggaagcattggctgtgtggcagacactgtgttaaatgtttctgtgttttgtaagatagataatctcacttctcatgaactcctataaggaaattactatcattgttgccattttatactcgaggaaattaaagcacagaatggttaagtaagttgtttaaaatcacacagctagtaaatgatagcttggaatttggaaataagagtcagaatttagtttaatcttctgactgctacaatatgctgtcttccttccattgttctctcttcctgtctgtgcagcctacccacctgccagccagccaactaaccaaccagcatactcggagtgtgtactgtgccaggtgccaggggtgcaggtcagctctcatggagtgcggattagtcctacttggcaggcatggttcacccagtcagatctcataaatcccctacttctatcctaaaattgaaaatattggcttttgctgctgtgtaaaaagtagcatgaattcattatatatagatactttggaaacagagaaggaaagaaatcacatacatactcctaacactcagaaaatctatgatcattaaggtctttttttttttccttcctctccccaatatggaaatcttttaaaaatttctatctggactgtcctgtaaggtagtcacaagcctcatgattatcaagcatttagaacatggctagtccaaattaaaatgtgctataacttcttcccttgctcttacctgtgtgggcaaggccctgtggctctcccccaaggcacactgcagacccgcctgcctctctccctccctgcctccagcaccacggtccaggccgctgtcacctcctgcagaatctctgcagtggcacctcgccccttgcattccattttccacccagcagccagggtgctcacctagaaaggtgacttggatcccatcctttttcagtgcttcctgtttccttcaggataaacgccagatgccttccttgatctggcctctctcgcctctgtttgctcaccttctcctttgctcggtagactctaacctttgcacttgctccccacttccctggagtgctctgcccatgactcatcccttgaatatttttctggtgttgagtgttgtcaccgcctccaggcagtcgtccctggtgatgtgatctaaagatcatcccctgcccatcattctcgcctgcgcacctgagtttattttctcaatgacactgaccactttctggagtgacctaaccgatttgttgtctgtggtctgtctgctccccctgggatgcgagcaccatgagacacggccttgctgtttgggtttgtttgccacaaaatccccattgagtgtcgggcccaatatggcagttgcttggttgcgacagatataaaaataaatacctatttatttactgaataagtagatttcatcatgacatggtggatgtctccaatagcccagggtttggccccaagtgggtggtgacacaggttactcttagctctggctttcagttaagtcctgcaagagaggccagtgtagggatcatagccccaaagaacccccttcccagctatgcctgctgccatgagtcacctccatgagtcacctgccatgagccctgggagagttggtgcccccaggggagatggccctctccaggaaggctagggcaagtgacccaaagatttcttagatgcagtagcactcccctcttcccatgccaacgtccttttcattcatgaagggtttgtgctgccaggagcctgagcagccctttcctgggaggcctctgctatctggttattgagctgcactggtggccacagtggggtcctggggcccctgagagcctctgggttcttttgcctcaaagttgacacatagcacatctggcgtgtcatgatgggtacactgatgtgttgtttaattatcccaacaccctacttaatagagaccattttccccacctcacagttgaggaagctagcactcagtgggtatagaaactcaccagggtcctagagccacagaggagtagagccgggtgcccctccacacctgactgtgagtcctccgtctcaaccacttctctctccttcttcttggaatgcctggattcaggcacctggccaagccctttcaccttccaaagcttcagtctcctcctcttgtgaaatgggaataacccatgtgctgcttgctggcacaggcagttgtgaaagtcaagtgcgggggtggaggaggaaaaattaacaatttcccacctctctcttaccctcagctgctgttaatcccaggtgagagccagacccagcagaggcagctagagaggcctgcacatacggcagctctcaacagcctcctggggagtgaaggaaggctgggaatggctgactagaggcagttttctgaatcaagagagatagcgggagtcagcccagagcttaggacagagagggcggcacaccagcctgacagagctgggccaagtgtcctccttccgtccccccagttggtaccaagggtgtcctcaccagcagggccaggaggaagtgaggctggagtggatggggagcaggagggcagactgggctgcaggagcctgctggaggtacctgggcctggcagctttcttcctgggctttaagaaccacaaggaaccattagctgctgtcattccatcttccccagactctccagaaaccccttctcaagatttctctttttcttcctcccaaatctcatgtcagttcctgggctatagccagagtattctaaagcccagaaagaaaaggctatttcctttagtaaacccagcttcagctcctacagactggggagagggctaccttggttcagttctacctctgagagtttctccttgtacatgtgtggaagcctagtgatgggggaaccctgagttagagcagctctccagggcttcagctgcaagggctggccccaggggtgtgggtctattttattctgtttcttaacccagacagttcttcggactctgactcgatacccactgctgcccctgacccctaccctggccctgatggattctgtgtgctttcagtgggaattggctctgtaagttctgcccatcaaaaataggtgcagtattcagaagccagagttccaaacccatgtctgtcatgcattaaaaacccacgtctgtcagagaatcttttgacttcttaacccatttatgccagaggttgcagttttttgaatttttgcggtcagaccttggcaatgaccttgagcagtaggatataaataactcccatgtgcttagcattccaacaatggaacgctaggcatacgtgggttgtcatctaaaacaggggacccatcccccaggccactgacaggtaccggtccacttggcctcttaggaactgggccacacagcaggaggaacgtgtttacagttgctccccattgctcgcattaccgcctgagttccgccagctgtcagatcagcagcagcattagattctcacaggagcacaaaccctgttgtgaactgcacacgcgagggatctaggttatgtgctccttgtgagaatctaatgcctgatgatctgtcactgtctcccatcacccccagattggactgtctagttgcaggaaaacaagctcagggctctcactgattctacattatggtgagttgtataattatttcattatatattacaatgtaatagaataaagtgcatgataaatgtaatgcactttaatcctctggaaaccatcccccgctccctgtccctggaaaaattatcttccatgaaaccagttcctggtgccaaaaaggttggggaccactgttctaaaccattgtttattttcttaaataaactttttatttcggaataattttagatttacagaaaagttgcagggatgtacagagagttctcgtatgtacccctcacccagtttccccatcattaacgttgtcgtgaccacagtgcctttgtcaaaactgaggaaatgacactggtatattacaatgaacgcaactccagactatgtaggtttgaccagtttttcctttactgtcctctctcttttctgggatcaatccagggcaccgcatggtttacattattttgatttatcatgtctccccagtttcctctgctctgtgacagtttctcagtcttcccttaatttcatgacgttgacactactttgttttttggaagtgagccctcccttaggattggggggtatgaggggtaggtgggttaagctccatctcctctgggggtgtatctacacagattatttggaacttttctgtaggaaagagttgtcttttctcctccgtttatttattcattcagtcatttatatcagtataggctcatgtctttttcttttacacattgggttctaatccaatactacatgatttattttgtttctcaagttcttccagctttggccattgggagttcttgcaggtttgttcctgcactctgtgacattgcccatccttcagttttgtttggcgtgtgtgtgtgtgtgtgtgtgtgtgtagcacttccgtgtgtagcacttcctttgctttctgacactacagtatgcttcagccccctctgttttttactaaccccacttctagaatcagttatttccccagggagcctggtgagttattcgctctgctttgttttgattttattatttttattttttaaaactgtggtgaaatacgtataacgtaatttaccattttaatcatttctaagtttacagttcaatgacattaaatactttcacactgttttgtgactgtcaccactggaacgttttcatcttctcaaatgaaccattggttttattagaagagatgtgtttattgtagggggtaaaatgaaacaaaggagataaagtgaaagaaaattgctgcatcccatttccctgaagcctgctcatctttctgaacattttctggccctcacattcctctgcgtgttgtctcttttgtacacatgagatcaggccagacgtttggttcaggaacctgctctttccccttaaagacctgtatttccatggttacaaacactgctaccaagaacatctttgtgcacctgtgtatttctacagggaaaaaaacctagaagtgaacttgctaggctggattttagtgaatgtttccaaagtgtcttttaaaatacaataaaagcagtctttttcttcaacggttatttatttatttatatattttgagacagggtctcgctctgttgcccaggctggagtgcagtgatgcgatcctggctcattgcagcttcaatgtcctgggctcaagcgatcctcccgcctcacttcccaagtagctgggactgcagatgtgcgcaccactgcacctggctatatatatattttaatttttttgtagacacaggatctctctatgttgcccaggctgatcttgaactcctgggctcaagtgatcctcctgcctcagcctcccaaagtcctggaattacagacatgagccaccgtgcctggcctgctcaactttttaatgagactctcattccaggtgtacctggaccagacagtaaactgcacatataccttttctaaacttgtacttggctgggcagtagttaagacccccagctcatccctgttcctgtccctgtatgtttcctaagaaattgcgtagggccatgcccacagaagaagactcagagtcagaggagggaacagggtccctgggtgtgttgaatggtcagtgtggtgcagggcccagattccagcctgccctagtcctgcctcaggaatccctctagggtgcccaggccttcatgggttggtgtggcctctgctatgtccagactggcctggtgccttggaggctagaagcaaagttgtattttctccctggctgtcctgacttagtgccttagccctcctgttgtttaggaaactagagagcccctaaagggccaacaggacagcttggctcacatggagggggaggagtgccaaggtcctgccagtggccccatgggacagcctgatccaggtctgtggggaaagggacttccctttgtcaagcttcgggagggacctaaaacccaacaagatctccagaaacctggcccagggggtggggataggtccttggggatttctgtggggcagctggtctggtttggaggatattagagctagacccctctctgcctgaccctgaagtttggcctggagagaagtctcctccaaggtagctcagactgcagagattggcaccctgaaggaatggttccctgtacgtgtgagagaggttggaccaaaagacaccaccagcatcaggaggagtcctggggggatagcggaggccagaaagtcatggcatctgtcccctctttccaggcaagaattagacatagcacgctcacttggctgctggtgcccactgtggtgggcactgcagggaggtaaccctgcctcccagaaccactgtccagtggaagcaggatggacctgcatggctgtggccatggttgacccaggcaggacctgagatcctatgggtatctagaatgggcctatctgccttttacacaatgtgagatcatgggcaagtgacttcatctctctgggcctcagtttatccatatgagaaatgacagattaagtgaccttttaagtcctttcctcagatggctgctgcttctggacagtaaagaagcctagagtagaaggagttctgtcaggtgaggtggttcggagagaccatgtggagtggtaccttcccctgaaccctccagatggtggctttgccttgcctctcagatgtgtctgccctcctgtaagttgtataccatgctctcttcgaggtatttcatcatgtgcttttcccactggctcctatgtaatgtttgtgtgcagcagttggagctctgccgcacggatcatggggtgatgtttttactcctgtattctgtgcccccgagtcaggcttttcttccatggattttgggcaaagcttccttgtgtgtcttcacccattttttttcctttagcccacacaagatgtgatcagctatccattgttactgagagatgggagttttaaatttttcaacaccaagcaagtacagaagtgttagaaagcaagcaaaggccctcctcttccacttcgcggggataacaccttgttaacaggtcagtgggtgcacctgccagacctcttcacgcattttacagtcacttaaaatgacgtgcaaatttactcccttctctctctttttttttttttttgtttgctgaaatgggatcatatgatagatatcattttgcaggtttgcagtcttaacgtcatctgtgttatccataaaaattcatgttatccttctttaacagtagagtagtaagagatacagtttcatcaaggtatgatatgaatgcctgtgtctgagggatacccacctgctcacatacatgcgcacacagtgacatcaggcaacttggtggttcaggtgactcagcacctgaacgaagatgagagcccgtgcccagaagaggccaggtgcccagctgtaacgcctggcacatggaggccctggcaaatacttactgggtgaaggaatgtaccaaagtcactgcaggatagaggtcagggatgccagacttgaaaacaggactctttcaatatttgtctgtctgtctttctgttttttgttttttttttttttctttggaagggaacaaaatccgtgaagtctctctgtttccttttgctaacctgatagtgctgaaggacccccgcatctttgcagtcagtgcctgaagatgatctgcccagggctgccccctgaggcttcctgggggaactttgtgtggtgggatttgtcccttcagtcactttgagttctctgctgaccttgactcttcatggcttcatgactaggactttgatttttcccttaggaaaacatacgtggatcgtttgtgtgtgcagccgtctgtgtgtgtaatctcctccttccttttccatattgttttcctaagggccatccctgcagggttatctaaataccatttcagattttgtcttttggttggatagtgtttgcggtcttaaagtttccaggaaataatgccttttctactagaggaagagaggggatagacatggatgtggtcacacagtacggcagctgcatttccaggttcctggtgtggctgaggtggccctgcgtgggtttctttctgttcccacctgagtcagatgccagccctctgcggctccgagcctgctgcggcgctgcatgcctgacctttggttcctcgtcccttccctgtctgtagatgttggagacagaacttgggcaatgcctgcatgtgtttgcccaaccactagatcttcatctagagcagcgctgttcaaaaccttctgtattgtccattcagtgtggcagcccttagccatatgtggcttggggacacttgaaatgtgtatagtgcagctgagaaactgaaattcgtgttttgttttatcgtaatgaattttaatttgaatagacatctggctatgactgcattgaccagggccctgtggtgagagctgggatgctgaagacaccttcctctgccccaggagcacacagactggggtgaaacaggaagtgagagccccagatgccctgatggctccgggatgggatctgttggagccagtgggccaactcatcctgggtagtcagggaaagacggatgtccgggaaggcaagagcacaccaggcggagggaagaatatctgcagagaccctgaggatgaggaaatcagagcgcttgtgaagcgcgtgaggaggagtctgtgaggaggctggcggggagccggggtggattcctgcagctctccctgtgtgcagtgtaggggttggggctcctcttaggggatattggaagtgtgtgtgagagaggggcaggaattccaaatgaacattagaattgtttaaaggaaaataaaactagcaagaaggctgcattcacatggggatgggctgagagtgacggggtgaggagcgctgcctcccacgtggctggagggtggaagggtcggggataggaaatgagatgggagggagctcagaggcggggccctgccccgctcccagtcatttggatttgcacactatggctgtttcaagcggccccctgtcccacaagttacgtctaaaagtctcagcttcatattctggcagcagctggggaaatgatttcagagcctgctggcatggagccattttttttttctttagcaatttcccggttggaagttgttgaaaggaagtggcaagcgctgcctgagcagttctagctgggagaggtgggtgctgcagagtctgggattccagggtgaaagccacaggttcccctgaataagctcttactgctggtggttcctgaactgaagatgcaggcggatctggtaaggggatttttgttgtgatcctgactggacatgtttctctttccgctctcctctacccttgcgttcctgtgtttaagatgaggccttctcccagagatgggggacaaagctgccttactcctgccaccattttggtttcccagtggctgggggtggccagagctctgtgtggacaccaggaatgtaggctgtatgaggcagtaggatgtgtgagacctaaccaggaaagcgaacccgcatttggctcctggggtgcagcttgagtcggcatgactatggccctcattcctagcctctccttcccacccctcctcctgtcggccccatactctctctttgagagccagaggcccagctgttcttacaaccttgctctttggcaactgggagcctccccaggaagcagcacacaccctcacccagcctcctggagggatctgtgccaatgtgtcagcccagcagcacagggctgccttggtaccagcccagtgggggctgggccacacagctctccacttaggatggggaaatggtggcaagtggtggactggcatgcctgtatcacctggccagtcaggagaggagctgaagttggagcatggaaggaaggggcaagctacaaggccagcattgtatagatgtcatcctgtttcatccttatccctgggacaggagacagggagatctgatgatcccctgcaagctgatggcaggatgaagattcaaacccaggtccttgtacttccttctcatacacaattttgtcatctaatatcttacccagaatagcacagttttggggctactgtatgatatgtagttgtgtaaatgaattgactgcctgcctttgtgtgtgtgcacgtgtgtctctctcttcccccctcatttcttctttcctttacattcactcgttactcatatgcacccattgatcacttaccttttacctggtaccttgattaattatcacagaggattaattgatgagcaaaatagtctgtcctggatgcttacagctagtgtgatgcacacgtctgcaaataactagggtgcgtagctgactgctggccccaaggagcggggaagggatgaagcatggtcaggtacagagctgaggtcctacttccattcagttatttattcactcactcagtgtgtatttagcacctgttgtgtgctcggcactgttctagccactgaacatgagttcctgtccttctggaactggcagacatcactttctccaatagatgaagtcattaatttttcttatcttgagccaaaggtacccacttttcagggtgggggttcccctggtttcatgaaatctgaaaaatcatgagcatgaatgtcctgcttagtcctgtactgcttggtgtttgtttgtttgtctgttgtttgtttgtggcagagtctcgctctgtcgcccaggctggagtagagtgacgcaatcttggctcactgcaacctccacctcccgggttcaagtgattcttgtgcctcagcctcctgagtagctgagaccacaggaacatgccaccacacccggctaatttttgtatttttagtagagacgggttttttccatgttggccaggctagtcttgaactctagtcctcaagtgatctgcccgccatggcctcccaaagtgctgggattacaggcatgagccaccaggcccggccttgcttggtgtttttgatcaatcctttggatttctgggctgcccagtccagtgaaaactgactagactagaagcaccatgttggcagggacctggctatttcattcacagctctatccccagtgcctggcatgtggtgggttttcttgttgaatgattggattcaaataacattatccaaagaattttggtctcttggcccaaggcgtctcaggagctctcacctgggccagtgaaggttgcgttacaaggatctctggggagggtgaagacgaggtggctgccggtggcctgctgaatcccagggctccgaaactgcctcaggcttctgtcggccacagaacttgagcaggactgtgtgcctatagccctgccatgagatggctttggtgtagtgtgtgcctgagccccctctggggactacctggctcctgagtggtcagcttgtgtgtgttccctcctcctcctaggaccacctcaaaggcaagattgctctagaacagatctgactatggccagatatcattgggaaacatttatgtcaacactgcactgttttaaatattataaagcagcaatctcttattacccttcttttaaaaaaatagcacataaatttcagtggcccctgctcctagctatgtacctttgggggaggccacaggattgggaaacaaaattgtttgagtgtcacctctggaagtaaatggccttggaggcagacaaaattttgacaaaattcttcctttgccacttgccagcattgtgaccttggacaggtcccttgacttctctgagcctgcttactgtcttagctgctcttgctggaaacctgggagtcgtttctgactcattgtgcttcctcaatgcccacgtggaatcagctagcaaatcctactggctctatgtccaagtatgggtctcaagtccttttgcatctcttttccatcactgccacctccctggtcctgactagtcctcggactgttgcagtttccccattcgctccctatatccactctttaccctcttgatttcattcttcgtgagctaacagtggttttagcaaatccggttatgttactttcttactttctctttttcctttctcctttcctgtttcctttcctttccattttccttttctgtttttttgctgcccaggctggagtgtagtggtgcaatcatggcccactgcagcgttcaactcccggactcaagttattctcctcctccccagtagctaggactacaggtatgcaccactgtgcccagctatgtttttattttttagttgagattgggtctcactctgttgccccaagctggtctcaaactcctggcttcaagtgatcctcccacttggcctcccaaagtgtggggattacaggcacgagccaccgagcctggctagatagttctgagttaaatattctgtcagtgtcttgttacgcttagcacaaaatccaaacccttcacctacctttgaggccccttaagtattcagtatctgccaccttcttccacgtcatctcctgcctttctgcactctgccactggcaggagaacgcatcagatggtttcctgtcttagcccagggcctttgtatgttctgtttcctctgcctggaagttgctgtacccttgtggctagtgccatctcatcctctgaccgggacttagaggtcagctcttcagagaggccaccttgtctaagcttagaggcctgctatacctgccgctttatctcagcatgctctttccttttagcacttattcacaagcttcaattatgtattttagctatttttttatttgtacagttggtattcggtagctttttttttttttttttttttttttgagatggaatttcaccttgttgccgaggctggagtgcaatggcacgatctcggctcactgctacctccacctcccaggttcaagctattctcctgtctcagcctcccaagtagctgagattacagatacccgtcaccacacccagctaatttttttgtatttttagtaaagacagggtttcaccatgttggccaggctggtctcgaacccctggcctcagatgatctgcctgcctcggcctcccaaagtgttgggattataggcgtgagcccccgcacctggccttcagtagctatttgttgactggatgggatggatagatggacaaatggaagaatgacatggcaccagggctcatagtaagtacttacttaatcgaagttatattcttctattcctagttagaacttttttcaaagcaagttcagatacctgttggcttaaaacagagacttaccagtttaggcaatacaaatccaaggaagtctggatgcaggggctcaggtgatgccattaggatgtgcctgtgggacaggcttgctccgcatggcaggtatgaagagcacaggcagctgagcctcactaccttctactgtagtcatgcttgtccatgaagggctgtttcccttggctgaaaaatagctgaaaaatcccagagaaggctctgattggcttggctttgaccacatgttcatactgtaaccaatcactgggctaagaagatggaagaccccccccccccacctcccccacccacagtaggctcaggaaatgggttcttggaggaaagacagccctgataacagaaggcagagacgtgtagaaacttttcctccctcagagatgatttgtcagaggctttgcagctccacaggaagggtctgcagagatcatgtttctagactacagtaggtgagcccaccctccagtttttgtttttaataacatttgttatttctctcactatgaaatcaatgtttattttagaaaataatagaaaggcaaagaaaaccctactcagagacaaccattggctgttagctttttaggtgttttcttaatatccagtaatttacatatatgtttattttcaaagtgtgtaaagtatagaaattatagaaaacagtaacagctcccatttattatggtttgcactgtaatcttactactcaaaggaaacactgtaaaccatttgatgcatttccttccagtcaaccaactttgctaggcttctctttttctttttctttgtagtttatttatgaatttatgctgtaattctttagcaggcactcccattgtgcctgggactgagctgtgagctttatgtggaatctcattcactcctctcagtaactgtatgaggaggcagtgcttttatcctcagtataaaatagagatggaaaaactacgtgaaattatgtttatttagttttgagatggcatctcaccctgtcacccaggctggagtgcattggcacaatcttggctcactgcatcctccatcttttggcctcaagcaatccccctaccttagtctcccaagtagctgggactacaagcacaccaccacagcaggctaatttttttgtatttttggtagagacaggcttttgccatgttgcccaggctggtctcaaactcctgaactcaagcagtccacctgcctcagcctcccaaagtgttggaattacaggtgtgagccaccacagctggccactaattattattttaaaacagcattctgtgaatctaattatgaacatccattgtagaaaaattttaaaatacagaaaagtttaaaaataaaataaaacccccacataaccctgccagccactgatagccagcacttaactgttttctacattttttttttcatttgcatggactccagttcacggtttctggtgtagacctctaggagttttgacagctgagcatccttttgaaggttgtcccatgagccatcccaggcatctgctgcagttcatagggttcttcctgttggtctccataccactcacccgaagcatgcgagaagctgcaggggcttgggggcagttggagttcatgtgggggtgggggttccccagatgattcactggaaggagggagatgaccgtgttcttattgactcaggtcctaccttttggagggaggtggcaaggcagggaaaacctcttggtggccttgcatcctggacatcctgggtgcctggtccccagcccctgctgcagggcctgctggagcctgcacatctcccacccagcacctgccccgggaagtatgtgctgactccccagctcccaggcacaaactatttttggctgcagtgactgttcactacagtcatgaaaacagaaacccctctccctgcctccttcttccctgggacactgcactgggggccagggctgccggggaccctgggctcaggcccccttgtcatgaatcgcctgtggagctgggtgacagccaaggtgtccaggggcacagggcccccacctctggggatgccaagagaagcccgaggcgtgagcccacctgggctggaggattatgaggtaggcacgggggtctgggcgcaggaggccattccacagctccctggagttgagtctgtttgctagactctgagtccctgctttgctacctggctgtagaacacgtgtggagaaatcgcatgttggggcagaaggtgcttgtttcatgacttcattcgctgtcttctgtgtgataaagtcactggggatcagttagaatcttcctgaaatagatcctccccatccttctagtgaatagtgtttggtcatttcctgcttttgagtaggacacacacttgttctgagcatgctgcttttttacagggagcttaagaacgtggagctgtataggctgatccagctctacctctccatgcttctggttgaccaggccagggaggccgatggttatagagactgtgagtgctgactttggggtcacacagaccaaggtccaaatccaggccctgttactcagggcttgcagtgtcttaaggtgtgtaacttaatctctatgaagctcagttccttagctaccaagcagttgtgcctaggctacttacacggtggtgataataccaatagttgttatttttatgattagactgattgtgaaaagggaaaatacttcaagaagctgtgtaagaatccatgtgccatggccctgagtgggtctcaggacctgggcgttagggtgtcgctggtgacgtgggatctgtttcttcttttcaaaaagaagaaaagtgcattgtcaccaaaatgggggtggggctcacatctgtaatcccagcaatttgggaggccgaggcaggaggattgcttgaagccaggagtttgagaccagccagactgacatagtgaaacctcgtctcttttttaaaaaaagttgtagtgggtaggagtgggcaagaacatggacttgaggagttccgcccatctgccaccttctaagccactgaggcctaggacctggctaggcttcaggtgaggccacgagcccagagccgcattgcttctggattgcacagggctctgggcccacaaggcactcatgtgacttggcgtcccttaggcagagggaggtgattctcagggcagacctcagggacatcttgaccttggctcccttcttggactagtgcagaaaacctggaaggaatgaaacctttgcacttgggcagggaatgcgtgctggaaactggctcgccctcccgggggcatggtatatcctggcgttggttactggcaagtgtgtctggacacctggatcctggtcctggcaccattgtttggggtgacccaggcaggttttctcctctgtgaaatgagtgctgactagattgtccctaagttccctttggagcctgcctttgatctcggcagagaaggggtttcttcccatccccttgaagatccattggcccctttcgtgcccctagagcctggtagctgtggcattggtctccccagcttctcctcggccatctgctcagggtctctgttgaggtcccatagctttgatgcctgttactgctgtggggcagaagttgttttcaaggtttctggaaaaccacagaggggctgcctgaggggagcaggagctcctgagacacctgtctcctagttggacccccatggggcagctccaaaacccgacagctcttgttcctaggcggaggagcctggttcttctgtctccagctctgggctcacttgctgtggcctggctcatctcccatctgaatggacagaccaccccaaaggacagacctcacgtgctaaacactgggacatgtccctctggtggacggcatctgtgatttggcttctggccccacaagggacccaccagactccaaggctggtgcccgaggcctatttgatagtctggacgccctctggcaccagggccctcactggctgaattccgagctcttgccctgtgcatgtggaggaggaggggactcgtctgaccattctctttttcaatggtgtgtccgagcaggggagaatggggagggggagcagtaaagatgccggggacatggccacacccaggaacccctgtttagttctgtcagtgccttgacccccaggagagctggggtcccccatggggagttacatctctagccacacctagcaccctgcaccctcctcataggattaccgcatcccagtttgccggcaacagtcccagctgaggcctgctgtcagggctctgccttccgtagaggaatagtgtccctgttgaggggcacgtcctgtccctaccctcctctgtagccccatcctcagccagctgccatccctgaaagggcctctgatcccaggccctcagctttagcccctgcacatagccctattttgtgcagggcgggactttctcatttgccagtcccctagaagtcaagtgtcacccaaggttaacgcagctttttggctgtggctcaccctcccacgttccatcctgacccacttttccttttgaatgttctttaaacatttaaaaaatttaatgtattcattttgactcaagttctagtgtgggatcttgtggataatactgtttctttttttaaaaagaattaaaattttacaatcacgcattttgtaaaatgttacaaaacatcctgggagtagggaaacccactctgtagaagccttcccatctcctctctacattttgggagtaattgggggacacaccagtgcccaaagctggagtagctgtgtgtgtttctctaatgcaggacacatccggccattttcacacaggagcctggttttagaaatgtgtgttgatgatgcagagaaaggtgacaagatgtgggtgtgcccgcaagcctgtcctgctgactgtgtgctgggggttaggtggggaggtgggaaaggaggaggagccaggcccagggccaccagcaggtggagcccaacagcattgctatgtgtttgggggttgccaaactctggcccttgggccaaatctagcccagcactattttttgtagagccttgtgaactaagaatggtttttacattttgaactggcgggaggaattaaaaacaacagaatatttcgtgacccgtaaaagttacatgaaatttgtttcagtatccatagttaaattttatgggagcacagccacacccatttgtgtacgtgttgtctgtggctctggtggtgccacagcagcagagtggagcagtttcgacagagaccatgtggcccacaaagctgaagagactctgtgtggctttcagaaaaagtttgcctattctcacactatgtattatacctctggatttatagaaggaggaatggggcctttccacgctgatagggagagcaaggaggcagccacaggacaagctttccaggagggtgggctggcctggagagaaagtggtggctgtggtgacagcgggtgcagctggaagctagatatctggtcccaggcagagttgaaaagtgccagcctcctccaaaggactggagtggaggctaagtgggattaaaagggaacatggagagacctccttggaggagcctcctgcagctgctttaaaccccactgccagagctcaccctagctgggcccagggatagagcggtgtggggtctggaaagtcatatgtgacctgtgatgccagtggtggcaaataaacgctgccctgggaaaaagggctcacttcataatgcaaggcagtggacacaagggctggctggtggtgggttgagatggccttgttctgtgtggccttgagcaagttacccgccctctctcagccttatctcccatctcaggctgttaggaggattgcatgtgctgacctctgtggttcatctgacagtgcctggcacgcaggacatgtgtaataaatgcttattgccctttcttgaacccctctcatctctttctcccctttgacctctattcctccacacccaccactgtaccttctttctaaacaagctttcaatcccaggcttaccaatgcatacgtgagaagaagccaatcctgaaggttccagttcaagcccagctccctactgtgagcccctatttgctttgtggagagggaggcagggacctgggcacaggagaggacgtctcctgggacagctgtgagtttgggctgggctcgagttcagtggaaggaatgtggcctcctgaacacagccgtgctgtggccacatctgccttctggtctggacatccccagacctgttctgtcctgggctgccttagccagactttgggccccaacgcctgtctgccctcatggtccgcacctccagaaattctgatttggccggtctgaagtggggcccaagcattgcgattcatttttaaagtccctggaaaattccagggcacaacccggattgagagccgttgatttgttctaggcagaaccactcattttataaatgggaaatccgaagcccaaagaggggcggggacttgtccgaggtcaggggcattgcggggacccagtctggctctttgcttcactgtgttggcctctagggaatggtgttaagaggggagtttgccctcaaggaaccaactgactctcctgggagggggttttgtttgccttgcttcccaggggtggggtagtgaggaggctgggcccggaactggccacaagcaaagccaacatccccaggctttctgctgatttctgtggaagcccctggaggctgcctgacctgggctcttgcctcagcccttcctgtgcctcccagaatatctgactgttactatccaagtctcactcctccctctccatgagccccaatggtgggtgcaggtaggagaaacatctgtcaggtgctcccttgccaatttgagacatgtggctcccagcctgggctgccatagaaaccttctccacttgctcctctctctctctctccttccagccccgctgggctctggcctcagagggatgtgcagggtcctatgtcaccacccacagggctctaggagcccacctttggcctctctggtctgaccagttcctggggaaaggtctggggttaaggatccctttcatcacccatgcacaccagtgatccaggttccacagatggacctgtgttccagcagcactgcctgaggcatgttctagggatgcaaaactgaacagaaacacagagcctgggtttgcttcttgatcttccttcaacccagctttcacccgtgttcttgcgtgaagtgcagtgtgtttgtatacgtggccggtacagcagcggtgccgcccctggcattttcctggtccacctgactggccacagggagtgtggcgcctctcagtgtcagcaggcccaggtttctaagtatagaccccaggcagccccgtggctgctagtaaatccctggataccatttgatacctaactggccctgagctgccggcttacccagcatggcctgtgacgccagcctctgccagctgctgggggagggggtagcacgttgcccaaacccatcctcaccctccactggagagaatggagaccagcagtctcctgctaatgacatgactggattgtcacagactgggagtgacctcagcactcaactggccctgctctccaattattatcagaaagaataacttaatcccacctactggagaacatatctcctggtttgagagagacaggcagaggcagggagccaatgatctctgatgctgtcactctgctcctcattcctgcatccccacctgtgtgcacccatgctaaccctgagacttgtcggagctgggactgggcatctctcaagatggattgggcatctcctatgatggtctgggcatccatgtcttccgtttttggtttgtagttccatattttgttctttagacagaagctggggtgggcagtaattccttggaggcagtacggactcccagccgggttctccagaactttggggtatgggcagagagaggggccttttgcccttggctttgagacaacttagcatcttctgggcacctcctggcagatgggatgccctcctggggcactggagcctctcagacctgagaaggtttcagagtggcttcacctgcgagttcaccttcagcaggtggcaaaactgattccctaatttgtttttggtttagagatgatccaggaaagttgtgagttactctgctttgaaaacatcttcctaaatcagacttggctgtgcctgtcactgtgggtgggcgagtcacatccatgtgtgaggtttcgggggtgctgagttgctttggggcactgttgagtcatgatactgggagatatcagggcccctcgcaggggccttcacagccacgcgaccgtcctggtagctttcctttcttgattaagttaacattgggtctcagagtcagttgtagagttgggaggtggggcactttgtttccagggtgggcccctcactgagaaagcctggtcccctggagtacttgctactgggcctgcatcctcccccgtttgcctacagaaataaagttttagatgtcactcactgatcagattaaccttggaaggcatcagattcttcccatggggtctccgcgcttaggcctggaagccccatgttcctcatggacataatttgttttgtttgcacagatttgaattagttatcaccatgtaaaagccagccatttaaaaataaaaattcagatttctttaaaaccagaagttctggtgcccctccattgcctgcccctttccccaacaccaagggaggaaagcgggggttttctgtttagcattgccattgctgccgttgggtttcttgttcagtaaaaaggcagagaagtgtgttaaatcaagtttagcctagagctacctccttagatattttaagttcagcctaaaggtttttctgtatatcatgaactataacaagtggaggtataaaaacactgtagactgcacttgtgccaatcaaatgtagccaactgttcgaatcttgttcaaataaggcaaaggagctgtaaccaatccagctgtttctgtacctcacttctattttctgaaagtaggtagaaattaatttacttcgaaaaaaataatttcccctgaaaggtagctgctgtatcccaaggctttgccaggttaacaagtggacagcatggaatatttggaggaggtttggaatcgtgcgcacgtgggtttcaattctgctcagccacttgttaagctgtgaagtctctgagcctcagtaagatggacttaactccatctacttgcggagttgattaaagataaaataatgtatacaaagccctaggcatattgttctggcaaatagtttgtaataataaatgtagttactttgagaacttgaaacttggtatgggtgaggaggagatgaataaaaagaaagaaaaagaatccctatttgcattatagttaggttgaagattgggtttcctcagcctggctccctccccagccccattaaacatctctatcatcatctgggcaaactgctgagtcatcacagccttggagtatgtggtggagagacaaactgaggacacccttccggacaagtagaggattgctttgttcagataaggtgaaggttgctcttgtgcttaccctgacggtatcgccaaggtgctcttaacagtcaaatgagggcaaagatatccaaacctcatttcagtggaagacaggctaagggaaagaaagcaagacatgttgattgtatagaagcttctgcatggcaccatttgtctaatctgcctcccctgctggtgccgttctcatcagtggttcctgtgacactttagttttatcttctggaaggcaaccagggttttggccaaccagtgatgagcttcttggtacagttatgtgtctggctttattttggtgtgatcatgctaagtggtgatgtgattcttgcctacagccctgaagattgaagaatatactgaaaagctacaaaagcatctgccgtcagcgggtacagtaaaaaacaaacaaatacagaaaggcaggcatctagctccagccttgctatgggagagaggggtatgggttgggcctcataccttcaggactcagccagtatcttcattagggttagttttgacgcttgagacaaggaattacagcatgtaaatggaatgacaatgaaattagtccttaaaagtaaaattagacacaacttgctaaaaatcaggattggcttagattctcaagaactgtgagctttatagcagtcatttgatgtggaatgtctggccttctctgttacagaaaatctggaaaatatagaaagggttaaagacaaaaaaaggtctgatctggtcccatagctctttgaactctctctgctctagtgcgcatcttactgcattgtagttacctgtttaaatgtctgtcactcctcccactgggctgtaggccacttgagaccagaggcatgtcccattggttttttatatttgtcccaggtttggtattgttgctggatataggggtcccattctggatcccaaaagagggttcttgagtcttgcacaaaaaagaatcctgggtgagtccacagaataaaatgaaggcaagtttattagagaagtggagaaacaaaagaatagcaaccccgtaggcagagcagccctgagggctgctagttagctattttcatggttatttcttgaccatatgctaaactggggtagattatttgtgaattttctgggaaaggggcaggcaattcctggaactgagggcccctccccctctttagaccatatagggtaacttctgggcattgccatggcatttgtagactgtcatggtgccggtgggagtgtcttttagcatgctaatgcattataatgagcatataatgagcagtgaggaagaccagaggtcacttgggataccatcttggttttggtgggttttggctggcttctttagctcatcctgttttatcatggggtctttgtgacctgtatcttgtgaccttctctctcaccctatgattaagaatgcctgacttcctggggatgcagcacagcaggtctcaccctcattttacccagcccctattcaagatggaatggctctggttccagtgcctctgacagtgtcatgtggctcaaagtagtcagagctggagaggtttcctccctccctgatgagaggaaagggcacaagttttgaagtccactgagccttgattctaccattcattctttgtattttccattgcttcataacaaatttagcagcttaacacaccacccgcttatcatctcatggttctctaggtggaggaatccactcaggctctgcttatatccctacttgggatctcacaaggctgaggtcaaggtgtaggccaggccttcctcttacctggaagttctggagaagaatccacttcacgttcattcaggttattggcagaatccatttccttgtggctggaggtctgaggtcctcattccctcaatggctgtcagccaggggctactttttttcccagaggccacccccattcccctcctccttcaaagtctgcttttcacgcttcaggtctcttgacttctctgttaccagctcaagagaaccctttgcttttaaagggctcttgtgattggatgaagcctacttggataatttcccttttgctgtatatagtaatacccccttttctgtaggggatatgttccaggaccctcagtggatgcctgaaaccatggatagtactgaatatatatatatatgatgtatactgtgttttttcctatacatacatacctctgataaagttagtaagttgggcacagtaagagattaataatcaacaataacaaaatagagcaattataacaatacactataatgaaagttacaggaatgtggtctctcttctctctctcaaaatatcttactgtactgttctcacccctcatcttgtgatgctgtgagatgataaagtgcctatgtggggagaggtcgtggcagttgatctgataaccaagatagctactaagtgacaaacaggccgggagtggagacagtgtggagacgctggacaaagggacaattcacgtctccggtgggatggagctggatggcgcaagatttcatcacattactcagaatggtgcatagtttaaaactataaattgtttatttctggaatgtttctggcattttccatttaatagttttaggctatggttggctgctggtaactgaaactgcagataagagggagacttctgtaatgtaacaagatcaggagcaacaccaggggacaaaggtcacaagaccaccttaaaattctgcctgccactttcttcaccgtatggcctagtgacctcgtgcaggtgacataatctctctgagcctctttcttcatctgtcaggtggggccagtgaaaagttttgatagaaatcaggtgaggcagtaagtgcctctgcagtgtttggtgaggtttttttgttttttttttttaaatccttcctttcttgagccagtttgatttgaaatctctcttatctgattcagatacaacaaaattgtgaagggccatctttgtctgaagtactcgtcattctaaaaagttgttatgactcgctgttttttttctgtgcagaggagtaagaagaaacaagctgggcaacatgccctcgtccaaacctttctggtctttacttcctcccctcaccccccaccgagtctgcttcagctgctgtctctgggagcctggagggtgggggccagggagctctgcttgtgtccccaagcacgtggtggctctggtcagaggccggcccagccagcagctggcccctgccactcagcaggaggccagcctgaggctgaggggctcccggcccagccgactgctcaccgcctctctgcctgtccctctgtccccttaggagatcccccgagacctcacgctggatgccctgctggagatgaatgaggccaaggtgaaggagacgctgcggcgctgtggggccagcggggatgagtgtggccgtctgcagtatgccctcacctgcctgcggaaggtgacaggcctgggtacgtggggcctgccaccctctcccttgcctggcctggtgcccttggggctgtggccttcactatggtgggtgatggagcggggcaagcgtggcccagggtttctggggcagcctggaaaggccagggttggatgttcacagcctcctgagaagctctcccagggtcctcagggctctggatcctggtgggtctggccaggccgaatctgaggggtttcagccatggttagaaatcccaggcctgtctgctgggctgggctggcctggcatggtttcctctctgttgagggctctgtgtaccctctgccagcttcccacattccagcccccagccctctccccgtcttctcctgtccccattgctggctgggttctgtgctcagaaggcacatgctgatgtgggcctgagccaagggtgattagggaaactctatggctctttagctgggagtgtgtacgtggctgtcccaggcaaagtgtgtaatcctggccttgccacgaggtccttgggaattattcacaggctttctaaatcttgcgtcggaaacagcttcaaatgcctgacttaatggtcccactaccacatagataaggcattaaaataagcctcatgaatggaatcaggcctggtttttaattatctgaggcccctgtcttatctccgtctgcctgaggcttaaggaaggcaccaaggtttatattctgcctggttttttcttcccagagaggatcgggcttaatttcctctctgccctcattgtatcaagtcctctgaacacggcacagtgtagaaagttgcactcaattcagaaaatcttgacctgccaggtctcccggcagatgctgaaaataaacacaacagaagtgtggctggtgttcttgttctcacatattacaggagactgagctcagagagggaaagggcttgggtaagggcacacagcagttggtggctgagccagaatttgaaccttgggccctgatggcgattggtttgtccccatgcttgccacccaagctgagatctttggggtaatttgtcagcccttctttgcttcctccttatgcctggattttaaagaattgtggaagagtcagcttttaagtggtagtgacctatttgtgtcatgcaggctgctgtctacctgtcctagatgccaagagagggagatcactaatttatgcacctactgtgtgccaggcgtgtgacacacatattgtggccacatcgttgtaagaggtagtgttgagctcgctttgtagctgaggcctctctgaccactggaggcgttggatgagtcatctggggccccacacctggcatggagcagagctgggctttgaactcaggtttcttgttcagagggtgctttttccagcaggccttagaggaggcccctgaagaagaagcattttctgggtttcttctctctcatttagtctcagcttgtggtgcctctgcatccccagcagagtcctagccccatcacagtccaggacaccggcctttcgtctgcccagtgctggctgcacttcacgggcacctgctgggatccgctgggtaccagtgatcccattagattgtgcatcacagcatcttcattgcatccccatggggcttggtgagagcagtctagtcagagtacaggtgggctatggaatgaaaccacctgggccctgcctgggcccagcactctgctcggccacttagaacctgtgggaccttggtgagttacttcacctcactctgcctcagtttcctcatctgtaaaatggcagtgataacgacacctctctcagggttgttgtgaaaaggaaatgagttaacgtaaagtccttagatcagagcctggcatgtattagatgttcttttcagtgtgaggcctatgaggtgatagaaagtgttgaagtcatttcctttgcaatctctggtctaaagaaaggtgagtgaacagctgggcatggtggcccaggcctgtaatcccagcatttgggaggctgaggcaggctgattgcttgagttcaggagttcaagccccccctgggcaacatggcaaaaccctgtttctacaaaaaatacaaaaattagccaagagtggttgtgtgtgcctgtaatcccagctactcaggaagctgaggtgggagcatggcttgaacctgggagataggggttgcagtgagccaagatcataccactgcactccagccttggtaacagagccagatgctgtctcaccaaaaaaaaaaaaaaaaaaaaaaaaaaaaaaaaagtgagtgaaggatggttgtctgtgctggtgaataggagatgaacattcctgctgatcctcccaatccttcacccgaggcagatatcactaacccacagatgtttctgtgtgactgtagtgtcattctcaagcagccactgccaatcagctggtgtcggtgcacacatcaagacccactggccatcctcaagtgggcctagagcagtggtgattaaataggcaacttgcaactttggggcttgtttcctttggtggcaagcttgctccctttggtagcaggcttactcatagattcatgaaattcatcctttcatctgctcaataagaaacctgtttggtgcctccagtaggccagtctatgagctacagtgtcagtcatggctgtagctcgtaaggagcaagcggtatgggagcacagggactgagcaactcctgtctagtcggttcctgaatagaaagtcactgcagtcaggtgggaggaagggtgtttgaagaggggatgggatgtgcaaagaaacttatgaattgggaaggctaattcatcccccctattcttgagaagtggcttgaccacctctgatggagcttgttacctcccacagctgttccgctctaggttattcagaatcagtagcattgtcgggggcaaggtggggagcacggtgctgagatcgatgttttcaattcccatcccaccactttcttagctctctggccttgggcagtgtctgtggcctccctgagtcacagtgacctccactgtacactggggagaagaacagatattgcgggagggaggagggaggcagggcttgtgcaatacaggtgcgtcagtcccttctcacaggctgtaaagaaatacctgaaactggattggttatttatttatttatgagacggcctggagtgcagtggcgcgatcttggctcactgcaacctctgcctcccgggttcaagcgattcttgtgcctcagcctcccaagtagctgggactaccagtatgcaccaccacacctggttaatttttgtatttttagtagacacagggttttgccatgttggccaggttggtctcgaactcctgacctggtgatctgcaggactggataatttatataaaaaagaggtttacttggcttatggttctgcaggctctccaggaagcatagcagcttctggttctggagaggcatcgggaaggctccaggcatagcggaaggcaagggggagtgaggcgtcccacagtgtaggagcaggagcaaaagcaagagcgagagggggcagggaggtgccacacacttttaaactcactctctcgagaacagcaccaagaggatggtgccaaaacagtcatgagaaaccacgcccatgatccagtcacctcccaccagcccccacctccaacattgggattacaattcaatatgagatttaaagttcttagcaagacattcaaggcccttcctgatctggccccactaggctgacccccccagcttcatcccttgcctctccccagcttgtccttacctctgacagcacacagaactcttcgtagtgaccagaaggtgccgtatgcccttaccttcccattatgctgttccctctgcctggtgctccttctccaccttcttccatagctggctcatgtggagctagcttcataggtggctcccaggtgccacctcctctgggaaaccttccctggcacactccctctctccacccccacagctgatttaaggtctgctcttctgcagagccccctgtcctggcacagagcatacatagtgtgttatgtgcctgtcatgcccattcgactctacaagcacaaggatgggtctttttaggcctttccacccagcatccagcatgtgcttgaatggctgtagctcaaacactacagagccacacaagcctcgggggcctcaggcacaggatcatggtaggggcagcccacagtcactcgaaggctggtgtagaaggaagtggctgttgatccctttcttcctggatcttttttcacaagccccagagcactttgctgttggatgctcagaatagcccctcgtcccaatgtttgaattttcttaaagtggagtttttccttccttcacacacccagcttccctttcctaactcttaaagattggtcaccccttcggtttctgaggtcaccccacttttggggtgggtttcctggattgctcccccaagacctgcccataagagccctgcacgagccagttcctctctgggctgtgcttcctcctctgtaaaacagagatccaggttgagtatcccctatttgaaatgcttagaacaagaagtgttttagagtctgggtttttttagattttggagcatttgcagtatgcctacctgttcagcattccccatccccaaatccagagtgctcccatgagcatttcctgtgagtgtcatgtcggtgctcagaaattcccaagttttggagcgttttggattttggattttcagattagggatgctcaacctgtggtagtatctgcgccgagggcctcatggttggctagataatgtgtgcgcatgagtgagcggcctttataaaccaggtaaaggttggtagttgaagccttcccttaagaaacagtgcagcctcacaccaggtgttgaacatctctggcccctagccatctcccctgtgaattccttccagccctgaccatctgtgactccacgtcttggtccacaggaggggagcacaaggaggactccagttggagttcattggatgcgcggcgggaaagtggctcagggccttccacggacaccctctcagcagccagcctgccctggcccccagggagctcccagctgggcagagcaggcaacagcgcccagggcccacgctccatctccgtgtcagctctgcccgcctcagactcccccacccccagcttcagtgagggcctctcagacacctgtattcccctgcacgccagcggccggctgaccccccgtgccctgcacagcttcatcaccccgcccaccacaccccagctgcgacggcacaccaagctgaagccaccacggacgccccccccacccagccgcaaggtcttccagctgctgcccagcttccccacactcacccggagcaagtcccatgagtctcagctggggaaccgcattgatgacgtctcctcgatgaggtgagtgctccttctgggcagctaccaaaagtgccctctgtggttttctaatcataaagatatatggaaggaccaataaaatcaacccctatagacgtgtgtaaagtcaaaagtaaaaggtgcccccatctttcagtccattcctcagactactttagtggtgtgggctgaatccttctagatttggttttgtatgtacacgtacatgcacatgacgtgatgccacgtatgggtcagggtaggccaggttacacagaaataacagatatgcccaaatcaccaggtcttaaaggaacaaagatttgtttcttgctcatgccgccttgtccatcttgtccatcatgggtcagcctccttccgggcccagactgtctgaacattgctggccacggtggcagagggagaagtgagttccagatgtcatgccctggcagctgcgtactccttcttggaagttccacccaccattcctggcccaacctgaacaggagaatgaaacagtgctctttgcccacacgcccaggaggggagaactggaatatttggcagaaaccactagtgactgtcagataccataccatctactctgtcccatgacttgttttttcaacttcccttggtatctctgagaacatcatgtcagtacatcttggaatgttttactcttttgtttagtttttgacttacaaatttttctatctatatattttgaacaagtgagacagtcacatggtccaaagcgcagcagctctgtggcttctcagggtacgtggtgaaaactctaccccaccatttttattcagtcacagggttcccctttcaggagccaaccaggctagcagttttgtgtatgtctataattaattaaaccccatttgtttgacttgttcatattatttcgttgtatagtttatcttgtcccttcttgatgggcgttagatcattgtcttttttgttacaaagattgcccttgtcagtatacccttggcagcacagaaagaaagggagtgttttccttgggtgcctcttaccttcttgtacccctgaggattggggcacctggtttctctcctcggcatgggcacccctttcctacgcttgatcttagccaaaaggccgagaagcaataagggcaccctttttctagggggttccttgggccctggtgtatcttgggccttggagtcatctttggaacgggcctgatcccctctcccagtgcatgctgttagggtcctttatgggatggagcctggacagctccgatgggtttgagtatgctgcccaaggaggagagatccaggtgtcaccgaccctgctgctcccactcgggctgtcctgctggggcctgggtcccacccagaaggggctgtagaatgcagtgatgatggccacacgaacatgggtcagtcagaggaggcctcacagtgggctcaacccagtccctgtgtttctgtcttctcccaagaagagcattaggaaagctgtggtctcattcccatgctagaaggtggcagggacacagcttcaggcagatgacacaactagcctcaaactccagccagtgactgagcctcagaccctgggattctgagtccagtccctgcagagctaccagaaccagcactgacgtgacgctcaggccacctcgctgttctggtgacccctgagtgctctgcttcctccagctccatgtgttctcaggggcagtggctgccccctggggaggctcagggtgtgtccctgcctgactctcctttcaggggctacctctgctctgcacagctgttatctctgccctcctgtccagccacacccttgccaactgatagttattttttctttttctgagaaggagtcttgctctgctgcccaggctggagtgcagtggcgcaatctcggctcactgcaacctccacctcccggattcaagcgattctcctgcctcagcctcccgagtagctgggattacaggcatgtgccaccacacctggctaatttttgtatttttaatagacacaaggtttcatcaccttggccaggctggtcttgaattcctgacctaggtgatccactcgtgtcagcctctcaaagttctgggattacaggcatgagccaccaggcctggtctctccagctgactgaccccttttcttgcctggctctgggccaggctctcccactgtgagccatgtgacctactgagcctcctgaggctcagttttcttgactgtgaaatgggctgaactctaattaccatgcttggttgctggcgaggcttacgtaagctaatgtattaaagtgcacagcactgagtttagatgtcccctggggaggcctggggaatgcccttctagtcctttccattgaggaaatgtccccacagagattgcaggggttcccagagtcaatcagccagtctggcctcaagccaggcctcagagtcctacgtcccagccccttgcctgctcccgcccaagggtagtgttctaggaacacgccgagccagcgtggtgacgtaatccccctctctgctttttgtctcctccaggtttggtaagagagattcatttccatcccctctaccacctgggagtcgtgtgtgcgttgctgtccccatcgggggtggacctctttgacccacctcttagcccgttcagcctctccatagtccagaagcagaggtgctggtgaccacctcaggaaatagccctaagacaggtggccttaaagtgactggctggcttcagcccagctggtggctgctctctgagaatcagagaccttgagcacatctcagcccacaggcagccccatgaagagccctgtctccaccttgcccttccccaccgagactctccagcagggactctggcctgctgggctgccacggtaaagcagcacccctgggaaggcggtgccatctgcctgatttcgctagactttagccatctccagaaccccacctgatgtcctgggatcccactcttcaggaaagggacattcctggaggcagaaatgtagcgcagctctgaatgaggccccaaaagatgggagatgcagaagcccctttgggaggagaggacacctgggcaacccttgaccccctttcccacccccacctccaggttgggagcacgttcctgcacgtggctatgctgtggggcctctctcatgagtcagagcggagggagacagctgtgcctctggagtctgcttttaattgtctggaaatgcagagatgtctggtttttgcctgagcaaaataggagtttatttttgtactatcccgagctggctaaggagagtcacgtagctgtgggcggggtcttggggatgaggaggggtacagcaggcagggactatgctgaagtggagctggctgtaggaaccccagggaggcacagggggagcatgaagaggagctacacttccctcccttagtgcccgggcagaaactcccagggcccttcacagaaccttggaggaacattcaacacccccatctctaggacagccccagccttgtcatcctccaattgctgtggtaacacggggactggagcagtgagattattaggccttcagggccagtgtctccatgcagatcagatggaggcggtgcttggcacatacaccacctcactgcccatgcccccagaagttggtgcagatcataaggtggcttttggggctaattgattgaagttccaacatagtctgtttctcctaggctggtagctggcacctttggccccatgtgttttttaattattttttcttttgagacgaaatctcgctctatcacccaggctgaagtgcagtagtgcaatctcagctcactgcagcctctgcctcccgggttcaagcaattctcctgcctcagcctcccgagtagccaggattaaaggtgcctgccaccacacatggctaatttttgtatttttaatagagacggggtttcaccatgttagccaggctggtctcaaactcctgacctcaggtgatcttcctgcctcagcctcccaaagtgctgggattacaggtgtgagccactgcgcccagtcatgcccatgtgttttggtggtcttggctgctgatgggtggggtgagccccaggaggaagttgggacaagtcaacctcatggcagatgtgccagggagagctgcgggtgagatagattgttcctatccccctctccttgatgtgggaggactcagtacctccagcacacccttctcatggaggttggttatgtggtacttggcctcaagtgaaccagcacttcatgagtccagctttgtgctagaccagcacttgggattgaggggggcagtggccaccctcgggggaccttctgactcagaggacatgagatggccacactcgagcactgtgttcctgacctttctgggtcacaggtcaccttgatgattggatgaaagtcttagatcttctttccagagaaaagtctacaacattctactgaaccagtccagagggttcccggacccccgaagcccacccatgggctggctctgggaggcaatggcgctgagtatgggggcgtgagttgaatgtgcgggctgccggtgggtggagagagtgcttccagcagcttgtctactgcactagggatgcctgttcttacggggaatcccaggctgggagagggaacgtcctccggaaggccagcagcaggggcatcccaaagcgtatggcccttatctcagcagagaaggagggtgcccaagaagtccccagaggctcaggcttgtacctgggtggggctggcccactcgagaatgtggtaaagcttcaccttgtcctcgttctatctgcccatatctggcagtggcctctcccagaggaatatcctccaggggcttctgcctggaaaggcactggatgggctggctagcctcggccctccacctgaggtaaacagcttcagccatttaccaggaaatacccagaattgagcccctgcacactgggggcctgtggtgtgtcggtgagaggttgcaagaggttgggctgtgtagaagcttctgccctcactctggctttgccttctgcctctccagcctgccttcttcctcatctggaaacatcacaggggcagctgactgagccatcctcagaggccaggagcaagctagaggaccaagcgaggcgaggggaaccacaccatgccactgggctagcctggcctgctcctgtgttgatggacatagatcagggagatgcttatataataaaccattgcgcccccctctagcctgtggtctctgaattaggaagtcatgggcacgagctgtcgcctgcggagttcctcagcctgcccatccggcctctttccctgcagatctctcgcatggatccccacagatggtacggagggatatcgggctgtcggtgacgcacaggtaggcacagcgggcctggagggggagcagggcacagccgggctggtacccagatggggccaggagttctggtcactgtttctcagcgagctctttgcctctgacgggcctgtccatttcacctgtgggacatggccctgcacttacctggagccctcaccttgccagggtggccacatggacttgcagctccctcatctgcacctcctcgggtctcttcctcactctgcttagggaaaacactttccttctttcccaggacacaggtcccgggagaaataaggtcagggtcatgggaaggagtcacaggagcttccctacatccagtgcgatgtcacatgagtcctgaaactggccgcatatcagagtccgctgtagagcttgttgaaaatccagattcccgggctccacccctaaggttcttgctcccctcacccccagtgttgatgtgagaagtaattaaaacccagtgagggagacagcacgtgtgcatgtgtgagcctccacagacctggttgcatcttggggaggccggatcgcaactccttaaaaggcacgccatgcagtttggcgtcccctgccaccggaagctcccatctttgttgggtggagagagtaacatttatggatctctgctaccttccatttacacggcgtatctgtgatccttcccaaatcctgtgaggcttagcattaaccctatttgcagaggtgtctgaggcatcttacagctggtagtaggcagaaggcagaattcaaacctagctgtttgcccccagagtctgttctctttcccttgtgctcggggccttttttggcctctgctggaccagtggaatctcttaccgagaagctctgtaactcttaagttcagagagctgggatccagaccctgttacacagcatcccaactgtggcaccttgggaacatcacctgacctctctgagttagtttccttggctgcacactaagaatcctggacctgcctcactccctggcatgggcataagaatcaaatgagctagtgttggtggatgcattacaaactacttcctaaatactgttggcattcattctgttgttactgtgatatacgttaaaaaaaatctgtgtttccaaaaatatgagttatttctgctcttaggcctccccaccctgtggaccagccttgcactttttttctggaggacaccacccactcagcccccatccttccttcaaatctatctttcgtgttttctttaatgttctacattttggattgaaaatacactgatacgttgaaacgtcaacagaaaattgccctcttgttcctgtccccaactcctcaaccccctctttaaagaggtcttagctgtgtgttgtcttctagagatattttatacaaacaaatatgtatatatgtttcctcctttattttttactcaaatactgcatatgttatacacaatcctatactctgttttttcaaaaatggagatacaatttatgtagagcaaaatgcacaagtgtgtgtgtgtatgtgaatttatgtattcatacacacacacctgtgtataccatccagatgaagatgaagaacattccagcacccagaaagttacctttagttctccctagttgacagtgctaccatccagtggttactattcacttctattgtcatagcttagtttttttcctgtacttgaacttcgtgtgaatgggatcatatcttattgtaccttacttttttaacttgacaatgtgatttggagatcattccgtatttgcacagaaagagcgtccttgttttagtttcttgctgcatagtattccatcgtatggaaagaccatattttagtcagctcctattgatggacacataggttattttccgtctttatgctgctaacatgctgcaggcataccttgtccatatatcttgcaacacatgtgggcctatgtgttggataaattcctaagaattcctaagaactgtggggtcaaagggtatgcgcacttgtactcttgattgctgctgccaaattggtactgccagatgaccacaccaacttcagcatattgacaatgatgactttgcatctgggaaatttaaatgtgaggggagaagcagtggcccgtgggtatctctgtcctctctgggagggggccaaggggctctgggatggagccaagactcccagttgccctggagctccatgggaaaccttctgtggctgggccttggcctcccagctggtgcaaacatgtgcctgtgtccgccctctgcaggttctccaccaagtcctggctgtcgcaggtctgccacgtgtgccagaagagcatgatatttggagtgaagtgcaagcattgcaggtgatgggaagaggagtgggggtggggggagcagacacttttagttcagtaaatcaaatgcgcttccctatgcttgctattcatagtcctattcagcacaccagggagtgatcaggtctcttcagggagactaagcaagttactcctggaagaagggaatacttgaggtgggctttgaaggatgaatagaagtttacaaggtagaccaaggggaaaagagaattccaggccatgggtgcatcttgtactaaggcctggaggaatatgaggactgttctgggacctgtaaggagttctgaagtttagccttgcattttgtagccctcgagaggtggcagacaggcgatggtaaaaacagggagttggcttgcggaaggggagagtgagcagagggtacagattctgtacaagtccaactttattttctcatgccttgtggtttctggtgggaaggaaggtcaaggatagggaacagtgtgggctaggcagagtgtgtcccctgctgtccggctgtcctcacctaatgcagggaggcctcggaggctcggtgcccagcccactctgcccctgcattgctgtgtgatctggggcaaggcacttgcctttctgggcctgatttttaatgtatacatcaaccatggggatggctctgagaacctgagctagtatgtgtgattgcatctgggctccagtcagaccgtagatggtgggtcttgtgcatatcagctggacccattactttcccagcgactctcctgacctctagggagttgctgagttttctctctagtctgggtctcctgtggctcctggccacttggtttacattagggacctctagctcccatcatgtggggagcacaggatgacctctgagcccagggctgtcctgcggtgcagtatgaggttgataggacaccctcagcccattagtgagaaatctaagactcagtgcagaaggcaggaccacagtgagaatccagttctttccaatcctggcccggggctgaccctcagacctcacggtccattgcacaaatgtagccggaggggctgccctttgggtccctgggattctttggtaaagcaaacattatctgtctaattctttttttgtaagttcagatttgtcttgagctttttcaatatgggtagagggtctccttttctttacaaaggaaaaataggtgggcaacctggggcaagtcgaagtgggcatcatgagacctgctttgctgtgaggatggatagatgacagcagaacgtggtaaatgctcagcatagtggctcagtgtagcagctgctattactattaatatcatgatgttctctactttcgagctaacatttgttgagaagtgtgtgaaaatggagacagtcctgagtgaatgctacacagagctacccctgtgtgcctgagcccccccatgtggtgctttgcacaccaacctccccttctttaccaggttgaagtgtcacaacaaatgtaccaaagaagcccctgcctgtagaatatccttcctgccacgtgagttttctgccttcctctcctctgccttctggatttgggtgaatctttagcttgacctgttccctggtgatgggttttccctcttttcaaacagtaactcggcttcggaggacagaatctgtcccctcggacatcaacaacccggtggacagagcagccgaaccccattttggaaccctccccaaagcactgacaaagaaggtacgctgggtaatgctggggaggacgcccttctgccactggccttccttcctataaagcacccctgcctcagaggctcagtggggaagtttggcatgacaccaccgtctcagatttgtggccagagggtggccttggggatcatatcttgagccactaggaggctttacatttaagttgtggtggtacagccgtgattcccagtcccttctcctttgagctaacacttcctgtgtgcttagtgtgtactggaaacttcttccattgctgtttcatttgagccccacaatagttctgaagggtacatatggatccatttcacaggtgagaaaacagcacagcatcccgagagcaagagacaatcccagagtggtagcctcggcagctgcccagccccaaaacctgggcccttagtcacagtgcagcagatacaccttcagttgttcattaaagcaattgccatggcagccaccgagcaaggctttgctgccctcacaagaatgcacccaaaagtaatacaaagagtgcatttccatccatagccaggtcaggcttctctgctgaggcagacgggtgtcctctgcagctagacagagtctgcaaagcctgtgtcccccaggagggttggcacacctgtcatgggcctctttgcacaggtatgcctggcatctgggaggtgccagtgctgatggcttctgacagcagctcccatcctggctggctgctgggtgcaggcttctggctgctgtggttttggctgtgtatttttaagtgtgttctacctgcagccccagaccaggggcttagcgtgtgcccccccgatgagcatgtgcccagttgccccgtggctgtggctggccatgtggctcaggccggaagagaaagacaggcaatgtggccaattcatactggggaccctgaagatacagcttcagtggctgctctgagagagccagggccacctcttactgtcagacaagaaggccggctgccccaggcctgacagtctgccatgggcctgcacctgtcctctctcctgcctctcgtttccctctggtggtagcttctcacccagaatggggaggcagcgggaaagatgatagggtcctgtcttagtgtgttcaggctaccgtaacaaaatatcatagactgggtagcttaaaaacaacagaaattagtttctcatggttctggaggctgggaagatcaaggtgccagtaggctcgatgtcttgggaaggtccaccttctcacagatgtcactcgtgccgcatcctcccatggtggaggggcccagcaagctccctcgaggccttccatgagggctccagtcctgttcctgagggctctgccctgatgacccagttacctctcagaggctccagctcccagtaccacctccttgggtgctagggtttcagcatgtgagttgtgggagttcacagtcattcagaccacagcagctgcccagccctggctttgagttccaactcctctcttgcttccatgaccttgagtgagccacttgacctctctgagcctcactttctgctttgtaaattggggttactaatgcttcattcacagggtatttgaagggtaaagagagaatgttcatgaacttgtagggagcagtaccatatcatcaactagtaattattttcccagcccgtcacagataggatcaattcctcagcaggaatgcagtgccccctgcccccattgccaacaatgtcataattgcccctgcctctcctctccagctacaccaagcacaccccccatgcctgtgggtcctgcacgaccacctgcccatcatgttcagtcctgcatctccacccacctggacaccacccctcagccctcctcacagcactctctctctgtcccaacttccccatgagcccctcctgcgtgcacctgctcgacctctaagtccatacagtggtggtgccagaggcctctcatctctgagagcagtggccctccaggatcccactgaaggttgctatgataacataagctaaccattactgagttctcactaggggccacacatggtgctgagaggtgtttatcctgttcccctttgacctcttttcccgctacctgcccctccacccctgcccaccccacattccccttcagcacagatgctccctgagggcccagtgatgctgtcttgctctcgttggcaccaagcacaaaataggcagtcaggaaaccagcatattgattgttgaatgattgaacaacgctatgacctggcagctgttacccccatactatacagtggctctgaaaggttggatcatttgtccaggatcacagagggactgatggagggtcctgagccttggagcatgagtgagaagagggagggctcagtggatccagctcccacttctagcttggcaccacatgatgtcaactatccctggccagtagattccagaggtcactgtgtaccccagagccttcacagcctgcagcaaataaacctgttgaacttagcatttaacccaacttggcctcaacttctttaaccaataattcctctcccacccccaggggaattgatgtttgcattcaggaagcactggtcagatccagggtcctgcctaatgtagaatccccctggagccctctctctgttggtcttttggccttgctgggacccaaacttctgggtgctcctagctagcaggtctgcaaaagaatgtggaacaaacatgtattagtcacctgctatgtaccacacactcccacctttgtgatgctactgatcagcgcagtaacgctctgacataggtgttgatgttttatttttgtggttgaggaaatggaagctcagagaggtggaggaagttgcctagagtcacccagctaagtggtggtggaagctggctgagaattccagtctgtctgcctccaaacccagtgctctttttggccacagggagaagctggagcttaggcctctctccctgccccccactttctcccttcaccccccttttctcatttctagtgcagcagccctcccttcccagggctccctgccccccacattctccctttgccccccttttccatttctagtgcagcagccctcccttcccaggcctgtctggtggtgctttgctcccacaggctcttgctcggagctgtgagatgctggtgccgttctcaggggtctcctctgtgctgtggctggggagccatggccacaggcatcctgaagccgggatcatgccaggcccatctcccatgaccgtgggcaaagcccttggcttccctgggcccttctcccctgagctctgcagtggggccatggtggcacgtagcgtggattgagttgataatcagtgccgcccaaacttcatcaaagctgaaaaccatctttatggtttctgtctgaaccaggtaccacctgggctaatacttacttataacacttcatttttatgtaatcatcactatcgtaattggaaaaaccatgatccctacagatagaaagtaatcattaaaacaagcacagttaaaaccaaaaagttactaagcttcatctggttatcacacttgcttaaggcttggagcttgaagccctcactctgttgaatgggcaatgagccagtgttggagaggcattaaagacatagcagctcaggccgaggccttctctcaggcagagcaagataggaaacagagtgcccctcctccctggcgcagcatcctctgtgttgtgtccaagggcttcctaaagatgtctcactaggcaccaaacgtgtttcccatggcaagcactggttgatgtgatccattagcagggggagcatgcttgctttgagtgtggaagggatgacattaacatttaagttgggacaacatgagtgaaccaggcctgtcctgacaaaccaactcctgtggtcatcttctagaaagttctttctagctccagaattcttacccctccaaaatggcagaccgcactagcccaagccatcacctctttcagggttttgtagtttgactctaagacttcacagtgcctttgattcagccaggtttccaaagaaaaggactgtacacctctcgcttatcattggtctccctacttctggcagagtgcctggtgcctagcagacatgatataacatttatcagagcctgaacttaattcattataaaatgctaatgtgtgcccagctcagagccagtcactgagtatgtgacggtcaccctggcctcatggaacacacaaggtagtgggagagactttcatcaggaaagtgcccgtggacatctgcagtagacacggtgccctgatgaaaaactgctgggaactgtgccaggatggagaggaggagcgtggtcccagccagggtgcaggaaaggcttctgggaagagtgtgcttgagctgaaatcagaaagctgagcaggagccccccggggagtgagcactgaggcgagggcctctgtgcgctgcccttcctcaaatgttagatgtgtaaaatgtcagaccctgaggattccctgggctgactgcttcctttccagatggggaagggagggtgtggctggtgggaggcaggtggggccaggacagccctgccattcccaacatctctggtcctgcaggagcaccctccggccatgaatcacctggactccagcagcaacccttcctccaccacctcctccacaccctcctcaccggcgcccttcccgacatcatccaacccatccagcgccaccacgccccccaacccctcacctggccagcgggacagcaggttcaacttcccaggtaccacatctccaggcttttctgggttctaagggatacagtcagatccccttctcagcagacccaagttcggcagattcaaggtcagacatggccacagctaagagctgatgtttatgaagtacttgtccggcgccccaagcacaatagctctgaggttgatgctgttgttttacagatgggaatactgaggttcagagagagggaggggcttgccatgagttgtacagcctgtaagtggcagaatggagatcaaacccaagtctgtctgacataacataatcctcgcactgccctcctcttcatggggtggcctctcctgggcagtgctcactttctcgggactggcttctgagctcccaggaggcatggccagcaacacagggagctagaaggcctcagggagggaatctggggtcctgctgcttcccactcgtgatctgggtaagctccttcaaggagacctctcgttccctttataagataggtgaccatgtaaagttggaattaggttgttcccattgtgtggatgaagacactgagtcccacaggagtttaaagcagagtagacctgagccagagctgacctccagctccaccccagcccactgcctggtgtctgtggggagaggtcaggattccagcctctcctgccctcagctgctggcctgggggtgtctgcctctccaagcagcagagtgaagcccacctgcccattttgggactgagctgctgcctcggcctccctggcagctcctcagagtcagtctcagccttcagtttattacagttcgcagtcccagaggaaggaaggtgactgtgacactcctgtttgctctggacccagccacaggccgtctccagcccatagagtccaggtcaggcccctgtctctggcctctggagctccaggtccatgaggacaggcacagctctccctgtgccaggagatccccagctggagccatacccagccagcaggaggccagggagcttctcctgggacttcttttggggacggtggagacggagatcttgtaggaatctctctctttgccttcacctcagcacgcacgtggctggatatctcctgacattcacgcgttgtcctgagcacacccctcccctccctgcattgagtgatggcccatttgattaacctcctctcccattctgctctgtctttattatgctctgaaactgtgccttttgctaaacctcccagtttgggtttttgtaaaagcaaagggtgtgtttggaacacggcagtcacagaaaaagttctttttgcacaatcagccagacccttgctgctttccctgatgtccccagattgggccttcatcgtcccctgcacagaggcctcactctctccaagatcctgtctctttggtcgtggcagcaccaatgggtcaaccctccccccaacccccactgcccgcccggctggcccggtggttcagctggagaaggcacgcctcctatcgtcccctgctctgtgctgtgcaggggcattgcacttgaacttcaggggtaaacctgggaaaagattatagtcacgtgctgcttcacaacggggaaatgttctgagagagagattccgtgatttcattgttacgtgagcatcatagagcgcacttacgtaaacccagatggtatagtcctccacacgcctcggctgtgtggtgtagcctgttgtttctagactgcaaacctatgcagcatgtgactgtactgaatattgtaggcaattgtagcacaatgctaaatatttgtgtatctaaacatctgaacacagaaaagctacagtaaatatacagcataaaatattaaaaatagggctgggcacagtggcttatgcctgtaattccagcattttgggaggccgaggtaggcggatcacttgaggccaagagttcaagaccagcctggccaacatggtgaaaccccatctctactaaaaatacaaaattagccaagtgtggtggcacatacctgtagtcccagctactcaggaggctgaggcatgagaatcgcttgaacccaggatgtggaggttgcagtgagctgagattgcaccactgcactccagcctgggtgacagagcaagactctgtctctaaatcagtcaatcagtcaattgttctttatttgtaggggactggaagctgctctggaagaattcctgtacactattgtagactttataaacactaaacacttaggctatactaaatttattttaaaatattctcctcaataataaattaaccttagcttacaacttttttacattataatctttaaacattttttttaacttggactcttttgtaataacacttagcccaaaacaaacatattgtatagctgtacaaaaactttttttttgaatttttataagcttttttctatttttaaaatccttattttttcttttactttttaaacttttttgttaactaagacacacacgctagcctaggcctgtgcagcctcaggatcatcaatatcactgtcttccacctccacatcttgtcccaccggaaggtcttcggggcagtgacatacatggagctggcatctcctgtgataacagtgccaccttctggatacctcctgaaggacctgcctgaggctagtttacagataactttttttttttttttttttttttggtaagtagaacaagtatactctaaaatcatgattaaaagactggatgtggtggctcacgcctgtaatcccagcactttgggaggccaaggtgggcggatcacctgagatcaggagttcaagaccagcctggccaacatagtgaaaccccgtctctactaaaaatacaaaaattagccaggcatggtggtgggctgggtgcctgtaatcccagctatttgggaggctgaggcaggagaatcgcttgaacccaggaagcagaggttgcagtgagctgagattgtgccattgcattccagcctggacaacagagcaggactctgtctcaaaaaataaatatataaataaaaaaaattttaaaaatgattaaaagtacaatatagtaaatacataaaccagtaatacagttgtttattctcattatcaagtaagatgctaccgtgcataatcgtgcgtgccatccttttatacagcttgtagttccgtggattatttcccgccagcgtcaccacagacacgtgaggaatgcatggtgctgccctgttaccacagctaccacatcactaggcaagaggaattttcccactccattataattagggccaccgtcatgtatgtggtcccttgttgaccaaaacaacattctgtggcacatgactgtatttacacccccatttgacagtgagacagctggagaggttagccaactccctaaggtcccagagcctagttatgtggcagaattgaggttggaacatgctgtcagcttccagaaccccagtgtatccttttcagtcacctatgagagagagagaaaaaaatgtgggtagggagtggtaaggttgagacactctggaggtacaggtggggctcagggggaggaggccattcttccgtacataacactgttaaacttttcagaatcactgtttctctcccattgtattttgcccttctgggctcacatgcatttcacagagtgctggtgaccggagacggggtcttggaatgcccaatcctccagtgcaagcccctttagtcctgcagactcctgccagggcccattttctcccagctcttttcctccttcctgcatggtttggcctgtccttgccaggtccatctggggtagggctgtcccagcccagtaacaagtccctgcctcccaagccggtacctgcaattccgctcctccctcctgcgttggccgttctgtgtgtgtgactcacctcctcttctgtttaaagctgcctacttcattcatcatagacagcagtttatctttccaggtgagtcctttgcatggttccattaactgccctttgctgtgaccccttctgtcctgcccacctgggcagggcgccctctctctgggtacctttggagatacttgagtctccctccacctgttctgagagctgactgcccatagaggatgggaagagggcagggcaagtgccctggtggtaggcctcttacgtgagaagttcttgctgggagggaccctggaatccatcccatccagcctcttggcacagagactgcaggcaaccttttcaaggtcacactgctaggagatggcagaaggactagaatctgggtttatagaatggggagaggactttttgctaatgccttatgagcatatgtcaccgtatcctcccttgcacaatgatgggaggatatcttatgcacaatgtcttagagaagtagaaacccatttgggaaggtctgcgggcttctcttagtgggcttcacccttctgtgccttaccacacagtgccatctgctggccattgctggaaatgcctccttattgcagaaagtttaaaggaaaacgctttcagtaagtcaatacattgagtcccttctgcaaaagttgttttctacacttactatgtaccaaccttttcattcctgcccctaaagtgcttgagatcagtgctttttactgtaactgaaggtgatgagcataatggtgtttaaaacaaagactgtagctgttttttttttggattgaacaggactgtcttgaagtcacagtattttggttactccaggcttttctattccctaagccagctccattagggggttgacttggagcatctgtgagtccttagaggaccatccatatggcgttgctcaggtgtgtgcagggcagcagtcagggccctgagaacccgcctcccggaggctccctctgaacagctgagcagcctctgcagtttcacaccggttttttgttgtggttcccctggttactagctctaggatgcacgcagggaattaccccaaaacattgggaagatatggctcttctcccagaagggtccattttcccccgaagatatgtcacagggagggcaaggaaatacatttttattaaagcaaacgtggacacattttggagcagaatgcatgatacactcttaacttttaagcaaaagcatgaggattcagagaggcattttgccttcccatctggggtttggggagaaaccacaccccaactcttactacttccctcatgctttaggtgtgtgtttgcctcctttggaacatttgagcagtgtgggatgggtggaaatgccaggcccctgctggtagtctgcagacacactgtgtccgggggaggccttaccggtagaggcttctaaggttctgatcccccagaaattgtgcacaggatgttgggcacatgtgtgcatttccctgataagaaggcccacggcctctatcagattctccaagtctgtgaggtcccagagatgttgacagcctgtggttcagatgaccttcaaaggcagaagaaagccctagaagaaggtcgagggaggtcttttggctgagcggggagagtctttgtccacacaggcaggagagaggcctttgatagcttcagccactgccacttcctgtctctctttttgcagaaaagagcggggagtgagccgtccatggcggccctggggccaccaatctccctgtagcactttggttccatgctggagtaacctttggttctggtcttcctggacgtgggacttttagcgccaaaactgggaacaccccaggctcagggatcagccccagctgcccactcttgggcccctgatatgtggcgtttcttcctctcccctgagagctgctccaccagtgacccatacctgaagccgagggctcggggcctctgtgctggaaattcccagcaactgtatcagccaccaggtgtcgctaatgagccacctgcatgtcctgccaccggccttgctggccaaagtgagggaatctcattagtttcaagggttgttgcaagcagcccctgcttccaaacagcagctttagccagcctgtccagtaaatgagagcccagtttgcttttaccacttgcttggtggggggcagtttggccacaggggcgtggtggtaatgagaagtctcaccctccccacctgcccagatcccctgcccagagcccctgcccagagccccttcctgagacacagctgtgtatgcagaagcaggtgctgtggaggctgcgtccttgcaaaatttatggaagggcccaggctggtccttgtgggagtgtctggggaacatgtggcagtccactcaggggaaaatcagcctctctgggggtgctgggtttcaagcacggtgtctctttggggagaggaaagcaatctcatgctttgtgtttggtttttgtttcctccagacatttcagcctttgcacacgcagccccgctccctgaagctgccgacggtacccggtaggcatccctaggtggtgtccccttcgcttctttggggaattattaaggctggatccatatccctggccacctcccactccacctttccatctccagccagccagatgcagaactccctgggctcattcaccctctgggcaagtgaactccacagagggttttatttgcctcctatcagtgcggtcaacattgggtggggccgcatgtgaaactggagcagtcttgggacccaggcgggttggatagagggcatttggagttagagaagcctaagaatagctcctgtgcagagccctttctctaccaggccatgctgagcacttgactcacattcccgcatctcaccctcagcgcggtggtaggtatcaaagtaggtgtcattcttaacatacagccagcccagagaggttaagaaattacataaggtcacacagctaggaagcgatagagctggttttccaagttgaggccgtcagattccgagtcctgtgggtgtgctctgagaccctgtgtagcagtgtcacatctgaaaaggggctttggggatcactgcccacctctcagcccccaccaccctcaagttagcctagggaaggctgaggctgcacaaggggcaggtctggccctcagcctcctgcctattgccatgctatccacgcggcctttcccctagccaggtgtgagtcagagtaagtacctttgtctcagatctctcccgggagtccccgctagctgagagcagagcggtgttcctcaaggtctccttgacaaaccttgtttactcttaggctcgatgaccagccgaaagcagatgtgttggaagctcacgaagcggaggtgagggtgacacacacgtgtccacagatggccccccctcttttttcccttccccatctcagaatgcgcagggggcttgagggtgagtgggttctggactttggcaagggctgtcccaggcacccattgcagaggtgcatgtcagggaagaacgatgaggaatgcaatggagcaagcttgtccaagctctgtcttccccacactccccaggtgattgtagccagggtcaagaaccactgccttgacccttgaacaaaagtgtcagccaaggctggatccctccattgcattatggcttggagaatgttaacagactgatttactcctgcccaggggagagtcagaaactctgtgtttaaacaagagttccagaaggatggatgcagtgaaattcttctatgccagggatgctcttgctctttcctggacaattagatgttgctcacaggtaggtattggagtattagcatgatgaagggcctcaggtcaccggggccagccgccacatattgtggatgaggacattgaggtccactgatgctaagtgagctgcacagcaggccagtgcagagctgcaactacaacctgggtcccctggcaggatgcctctctcccctgttacctggctagggctccaggagaaggaagagacgtcgcagagcccagatctgctgcccatccctgttcttcctgctctcctttcaggctgaggagccagaggctggcaagtcagaggcagaagacgatgaggacgaggtggacgacttgccgagctctcgccggccctggcggggccccatctctcgcaaggccagccagaccagcgtgtacctgcaggagtgggacatccccttcgagcaggtagagctgggcgagcccatcgggcagggccgctggggccgggtgcaccgcggccgctggcatggcgaggtggccattcgcctgctggagatggacggccacaaccaggaccacctgaagctcttcaagaaagaggtgatgaactaccggcagacgcggcatgagaacgtggtgctcttcatgggggcctgcatgaacccgccccacctggccattatcaccaggtaaccaagccctaggacctcatgctggatggccagctcagcctcccccttcccagggagccctgtttgtgtggatgccctagagggtgtggaagttctaatagaggcataaagaagaaaaccaaaaatggggtataacttcctaatcacataaccgcattgacactaaaaaataaataaatatgggctggtgcagtggcccatgtctgtaatcccaacactttgggaggccaaggtggaaggattgcttgagcccaggagcttgagaccagcctgggcaacatactgagacgctgtctctacaaaaaaattagctgggcctggtggcaggtgcctgtgcctgtggtctcagctacttgggaggctgaggcaggaggatcgcttgagcccaggaggtcaaggctgcagcgagccaagatcatgccactgcactccagcctgggtgacagagtgagacctttctaagtttacagaagatcaaatgtccataaaaggtacagagtgaaagccagtcttctcccactgcaactgagcgcttctccccaaagtcagagacactataaacagttaacattccttctgttaaaaggaagacatttgcatatactcacgtttttaaactgtttattcctttttgtaaaaatacaaaggagagatcatgctggctcacaccttgcctcctgcacccgattgtgggtctgaggtctactctcttctaacacctgcacagtatccccatcacgtaggctgaacccagtggtgtgctggtaaatgtgtaacaaccagttttggggcagtatggagggaagccctaatttataacatccatcacttcctgtggtgtaaatactctcaccatggtcaatttcagactaccaatgttatctcctggagtggagtagagttgggaagagttgtataatcaagagctgatcactggtggtcccgtaatttatttacagaacaagactccatctcaaaaaaaaaaaaaaagtagttaatgaaaaacaaaacaggtaattaattaatgataaactagacagggtctcgctctgtcacccaggctggagtgcagtggcgtgttcttggctcactgcaacctctgcctcccaggctcaagcaattttcgtgcctcagcctcccaagtagctgggattacagccgtgtgccaccacgcctcgctaatttttatattttcagtaaagatgaggtttcaccgtgttggccaggctggtctcaaactcttgacctgaggtgatccgcccacctcagcctcccaaagtgctgagattacaggcgtgagccactgtggcctgcctgaaacaggaaaatattcattaacaaaaaaatcttactttgtttagaatacgctgaagaaaagtgggacacagataaggaaatcaccaaccaatattctctaccccttgcctggttttcaaaggctctgagactccaagaatattttcctaaaaacatagtcccttcctaagatagctcccttggacccacattctctctgggtccctcctcacccggggttttaggagttgatgcaggtggcgaccccagaactgaagctccttttccagtagtcaccttgacgcccctaacatctaccccaccccctttccctccttgcacactcctttattgtaataaaaaccctgtgatcaagaaaaaatgaaaactataatgagattcttgacagtgagccccagagccttgatgttgcctgttgatgcccttaaattagccaagttcttccccatcagagtggtcctgccttgaacccaccaagcatggctactctgagttcctgagagctttgatgcactgtttcctgttgtaggatgggcaggcactggctctcagggaatgggggtttgtgtgcgtgtacgtgtgtggtgtcatgtgtttctgcacgttcaggccaggccccagcaggactgggctgggttaaagaagatttggctcacagtcgaggggctggagagagtccttgcaggcagacgggcacagttctccccatgggctccaccagggttggggtcaggccgcaccagccccagacttgtgcttgacccccaccaccctcgacagcttctgcaaggggcggacgttgcactcgtttgtgagggaccccaagacgtctctggacatcaacaagacgaggcaaatcgctcaggagatcatcaaggtgagggggtgcccagctgctgggggtgggtttctggccggttccagggctctcggctgttcctctcgccctgttactccctgttagggtggtttgggcagctttgcctctccttctagctcaggctcctcaagggtgggaccccatctcttcctccctgtctctgtctcattcattcagagctgggagctgattgtccacatgattaggcttgatggaattgacttggttgggaaggaacttggcaggctttagaggccagtttcaatcctggtcacaccctttgtgtgaccttgggtaggtttagcctctctaagcctcagttttctcccctgtaaaatggggatcttcatatatcctccctctctggattggtgtgaggttaaaaacgcgataatccatgctgtggggtacacaggagccctgggtctggtgtttgaagacagcttgaccttggatgagatcatgcctatgtcaggtcacccacgctccatgcacctgactcatcagtgttagttcaaatagagcattggttagaaatcacccactgccacctcttcgcttgataggtgaggaaaccagtcttcagagaagttgagcactgtgtccaaggccacagagtgagtgagaatctgagctgagatggagttcaaaccccagatttcttagtccagggctccttctactacagctcagacattaggagcactcaaagttggggaccccgctgtgggaatgcctctctgttcccccaccttgagcccttgtcctgcctgagagcacagaccagctgtgcatatcctgacagaaaaccccagctcatttaggccctttatgactgtacactgataaatctcactgtccctgaccccccggctccctgcccatcaccctgttcacacctcctaccttagccaaggttaacatggttgtttagaagcatggtaacattaaaagagcatagaccggtctgggatcagatctcagctctgcttcttcactgctgtgtggcttggagcaagtgactttccctctctgaacctcgatttcttcttctgtaaaatggggacaatatactgcatggaattgtgaagatcaaatatggggatttaggtaaatcatccagcccagggtggcacctccgtcatcgttgcacatcttcactcctcctgatgtgtcctccagggcatgggatatcttcatgccaagggcatcgtacacaaagatctcaaatctaagaacgtcttctatgacaacggcaaggtggtcatcacagacttcgggctgtttgggatctcaggcgtggtccgagagggacggtgagttggtcttgagtgtctgggtgggttgtgggtgctggatggggaagagcagggctgaggtctgggcactttcactgtttgttgctgagctgcagccctccctgcagggaagcccaggtcgctttggtcctgccctcgtagttctggttcagaatcagatttgggtcgcgtttggattctcaggccgacttccacggaaaccaggtccccacactcacatttgccctggctgttcacccgcttggccaaggaaccaggtcatttccccacgatgaggaagagtgtcaaattttatttccccaaatcttgaagggattggcatagggagaaaggcccctcccctcacatctaggggaacccaaaagggagcatggcagcaaggctgcaaggccagccccagccaagtttgagatccacaggcagatcagggttcctggttagagaggcgcctcattctccagcagagggagctgggcaccttcaccagcagctccctgtcaatatttatccattcttgccctgcttttctagaaacaaccggtcatgactcctttgtagaattcctcaaaagcaccggtgcctttcccaagtgcagggtcagtgttctgggtctgggtgtgttttctaagctgtgtgtgggtgttctgccggccctggggcagacctgtgccaggcaggcctctttgctgcctgctgaaaggcctgtgtccttgtcccggcttcctggtctccaggcgtgagaaccagctaaagctgtcccacgactggctgtgctatctggcccctgagattgtacgcgagatgacccccgggaaggacgaggatcagctgccattctccaaagctgctgatgtctatgcatttgggtgagtaggcccctggtgccctgaggccaagtgtggccaaaacagagggccctggtggccattgggggcagagggaggcatgcttttaggtgttgaaaacccaggctctggagtaaaaaatcaaccttgagtcctggctctgccgcttgttgagtgcatggtcttgagtcctggctctgccgcttgttgagtgcatgactatatccttgacctggaatagctcctcccaacaaggtcatttcatgaggactaaatcaggtaattgtgtgcagtgcttaacactggctgtcagccccacccagctgatctgggaggatgctcaccagagctgaccaagaactgctcctcccagtctgggggagctggatatcctgccggctctgctaccccacaaagacctgggtgctgaccagtagcaatataatgtgagcccgatatagaagttaaagttttctaatagccacattaaaaaagaaatggatgaaattagtttcccctgtttatgttttatatattataaaacgatatattttatttaactcaatatatccaaaatattatttcaacatgtaatcaatatacaaattaataagatattttatattcttttttcctactaagtctttaaaatctggtgtgttttctgcctagagcacccctccattcaactgtgcacatttcagtcactcagtagcccccctgtggcaagaggctcccacattggacagtgtgggtctgatggagaaagtcccatcccaagtgaagaaagccaaggggacgtagagaggccaaggaaggctcaccaccccggtcacctgtgctgtatctgggtatccttcccagtggggtggccttggcgccatccttcctccctgacctttaactgtatcctttcctgagcacccatgtgtgccaggtgctgggcttggcaatttagtactcctcaaacaaccctgtgacaagagacattagccccactgaggtgaagcagttttactgggatcttgcagctagaaggtggcagagctggatttgtgctgaggtcagaatgaccaccaaggctccggtcaaacctgcgctgtctcagacttcccacccaacgagagcacagggcccaggtcctctagggctgggaggagcctccaggagcccactgtagcatcccctgaagccaagtgggtgaggaaggctggagaagggtcctgatcctctggctgggctatggctcaagggcccctgggcttgagctgggcacagcggcccaggagctcacagacatggctgggtctctgcaggactgtttggtatgagctgcaagcaagagactggcccttgaagaaccaggctgcagaggcatccatctggcagattggaagcggggaaggaatgaagcgtgtcctgacttctgtcagcttggggaaggaagtcagtgtaagtagtacctgccctgggtggagcagtagggctggaggtggggtggggcatgtggcatggctgcccttcactcacccacctgagaaatggggtcggtgaggagctctgccacctgcacgtgtctagctagagatgaaaatgatatgcattgcccgggaatggggaaggaacagggaggcataaataagaaaatatctatcctcaccccactgctcacccttttcattcctttcagtcttttttttttcttaaagataatggttttcattgatttatgagatgaaaagaaagtaaagccccatgttatttacatgaaagaagataattttttttaaaaaaatcactgctgaaaatacaaatagttgtgctatgctgtggtattaaatctttcctcataatgtttttcttgactattaagaacaaatcaaagtttccacagcaaacttgttttcaaaaaaccaagtcttaattatagtggccgacttctcatttctacatggtttctccttaatggattctctgtgtttgtaagttttgtcaggctaaataagagagagaggctctcaaaagatgtttatttggaaatagagcgttgcactgggaatatgcatgccatggtgaatggcttgcttattcagggaggtaaaggaaaaaatgaagaggattacacaattattttgacatatttagtagttttccctggctacagagatgagtaacaagagtgatgtcagtccaaggttagacaggttgtttgaggcagatgtccttgtaggagtatttttgtataaggttgccatggccttcgtacaaggttgcagtttttgcagtctttagtggtagtttttgttatcagacatacaagcccaagaagcctctcttcatggctttcccaggcccgatttgtcagagttttcttcacatttgtgactctcttttgattctgacagctttcagtttcctttatcacagcacagtgatatataaagaaactccagggcttggtgttttcagtgccatcagtgatagccatgtgtccatgaatcagataggattgggacagaacagccttgatgttaataagcaactccagtcagtatttgggcagcataacaattgaagtcttcagagggaccacccagcacttgtccaggctaagatacaaacaggctgtgagcttcttgttaaggtcatgaacattgctggcaggatcactgtctgtctgcagactctgtctgcaaatttgcagtgatgaattcaacctcatcgtcctccaagttcttaatagatggtaatatttttctcaattgactggtggcaagcagctagggcgtcttcagaaggctcactcaagatgacattatatctgatctactttattccacagtagtatatgtcatcttgttgaagtgcaaaatatttgtacggggatgcccctccaaagatgacaccaaaatgctatttaacaacacgaacagcaggctcctctttggccagttgataccatttcatctggggtgctgggcaagggccatgggtgatgagcacttctctgacactctgaggcccgtccttcttggcctccttctgggccagggccagttaaacaccaccttcaccttggtgcatcctcgggtgccttaggagcgtgtggtggtgatgcagaattttttgctccttagctcagctaaaatccaggttcttgtctcatgaccaggaaaaattaggcatgcggacacattgaaaggtgaggagagtggaattcattaaaagaaacctctcagcaaaaaagagggggtcctcccaacaggctcccatctcacagattgaatatcaggccaccacacacgagctgaagaggccaggctcctcccctgcataaggcgcgaattcctggtggctccaccctattcccccagtgcatgtgggtctccagtccattgtgggtgtacccaggcaagaccctgtgcaggttccctcatctgcacaaaaacatctgttgtaaacacttgtggggcaggatggaggttctccagggacccttctttatctgcctcctgcaactgtcagtgggctcaagatacaggttttgggctcctggctgtggctgcagcctccttggctgagctctggggcagctcagatggcagctgaagtaaccactgctttccagtctttttaaattttttttgaagcagttttgctctgtcgcccaggctgaagtgcagtggcacgatcttggctcactgcaacctctgcttcccaggttcaagtgatctcccgcctcagcctccaagtagctgggattacaagcatgcaccaaaatatccagctaatttttgtatttttagtagagatggggtttcaccatgttggccaagctggtctcaaactcctggcctcaagggatccatctgcctcagcctcccaaagtgctgggattacaggcatgagcccccatgcctggcatagtcttttaaaaaaatatttaagacatacatatcataaaacctagctgatttttttattgtgactttttccacatgacattttattatgctcattacctcaaatcattaacaaatccttattgttaagactgtctgcccttatgtcctgtggccgcaccataatgtaactacttctgtcactggacatggggattctttccagttttaacctctctttacaagagttagcaaggacatctttgtataaaccagagtattatgtatatttgttgcatctgagagaaaagatattcttcgttctgccctcctggcaacagtttgtttcctttctgcatacttagcatcttggagcagagaatggtaagtgccatcttcagggaggcaaaggctggagcagagctgagcaaagggctgcaagggagtcaaggctcggcactggctgcaagttggaatcatctgggagctttataaaaatgccagggttaaggcctcccccacagaggtaccaattaaattggcctgggatgggaataagatcatagtttttttattttttatttttaaataaagctcctcagatcattctagagcacagccagagttctgaactaattggaaggatttcttttagtgcggggtgatggttgttttgagaccagtgtgggatcagggcgtggggagtggggagagagcagatgctccggcagcagcttgtggctcacaggagttccctttcttttgtccagtcttgccttccctttttaacacattgctattaggggtaggggaacattggtcaacgcaataaaattattttctgtcatagacaaaagctgggagtgccctctgagtgatgcctttctctgtctctccagccacactgctgtatagttcaccaccaggcactgctttatgtgctgaggcagccagtgagttattaatcattgtatttaagggtccatgcatatgggaagacatcaaaagaccagagggttcttaatgaaaaccagcagtccctcaccctagatcattctccaaaggcatcacctgggtctatcagcttttcactctggcactccgttatttctgctgcaccactttggtcagctctcccattacttattgttaaggttgccatgattaaatcttccatgctgtgcctgttgatggaggctgaaagtgaaaagatgatgaacagtgtatacactactatagtagactgtaagtggtattagccactggtcagatgattcactgggattacattttctttgtgggtccatctcttccacttcatcaattactcaaaggctcacaattttgttggcttcacatttggaccatggctttcttgtgcagtttaggtttttcctgtagtttctaattgccttcttttttccttcttgccttttcttattgctgagagaagaaacaaacacctttctcatattcctgaggtctttcagcttctgcattctgcttcctaaatggaatctgttacattcttttcagagtccactggtttcttgtcgttggaatcaatgggatattaggcctgctgcacagctgttacccttctgttttcttttcattcactcctgggtcagttgcactattctttatgtctcatatcgtgccctctctttatttgcactccagcaaataaactgcgagtgaaacctgaaaaaactgcctcccagtggaagaatgggagataatctttgaatccttgcatgcctaaaatagttattatttcatcctcatatcaggagtagaattccagattcataataattttccctgagaacacagggattttgccctgctgtctactaagtgtccagtgccttgttgagaagtctggtgttggtctgattctcaaccatttgtggatgcctatcttactctttctggaagcatctaggattttctgtttatgcctgctatagtgaaatttcataaacatatatctgagggtagagtttttttgtgtgtttgtttgttttttaactgtttttagtgaggtccctttattggaccttttcagctgaagacagctgctacctttgaaagcttctggtaaattttcttttattatttctttgataatttcctgcccaatagtctgtttacttttgtggaaatccccattagacagaatttggttcttcttagtgagcctacatttctcttaccttcttttgtattttccatccctttctagaattgagcctacagtctgggggatttccttgatttttatcttccagcacttttaatgtttcagttcagaaattatattttcatttcaagcactttcttatttgttgatttcttttttattgcagcctggtcttgttttatggatagagcagctgcttcacacaaatgtacacacacacacatgtacaccccatatcctccagagacagtatcttgatctgcttatctttgatctctctctggttttcctgatacggcaggcaaccccatggggtccagttgtatttaagagcaaaagcctgagttgctgagtctgtgtgggtgtatgtgtcctgcctggtcgtatgtgcaagaaataggcctttcctcacaggcagctctgaatcagaaggctgcagggccgtgctggtacacatgtggatcctgagagtaggcagcaaaatgccacagcaagaagggctttgctctgggggcagtcgggacagctgttctgctgactcttagctgctgcccgtatatcgagtcttcttgtcactccagccgccattctagtaatgctgaggctccctcgtccactgcagccccgccttgcgcatattccgagcatcttgcatttcacctgtgaacgttgtaccttgcactttgcatcttcaaaaaaccaacagccccatttctgatctctttcccattgctggtgtgttcatcatggttactcttattttggggtgagcatggatctaagaaggaaggaggtgaggtaatctcatgcattccatgttgaaccagaagcatgagtggttctctgaaacccagttacttctcaccccttcatgtcggcagggtgttcagggggccgccagttagagggcacttgagaacatcaaagggaccctttgtggagcacccctactgtgtgccccctccctcccagccagctcacacaccactaatggcagctccatttgcaggagatcctgtcggcctgctgggctttcgacctgcaggagagacccagcttcagcctgctgatggacatgctggagaaacttcccaagctgaaccggcggctctcccaccctggacacttctggaagtcagctgagtaagtgcctcttccatgagccagactgccagccaggccctcgcagcctcacctggggtcttagagggcaccttctgatctttctgcccaagactttgttttttggggttttttttgagacagagtctcgctcttgtcatcagggctggagtgcagtggcacgatctcagctcactgcagcctccgcctcctgggttcaagcaattctcctgcctcagcctcccgagtagctgggactgtaggcacctgccaccacacttggctaattattgtatttttagtagagacggggtttcatcatattcgccaggctggtcttgaactcctgacctcaagtgatcctcctgcctcagcctcccaaagtgctgggattacgggcatgagtcaccatgcctggcctctgcccaggagtttgatctgaggaatacacacagtaggtcacccagaggtgactagtccccttgcccaagtgatacgaggatttcgtttaccacatttattttggagactccctttgacaggtgagcacctccagtttgccgctatgaaatactacatcatcactattagcagaccagcactgataccaggccaggccaggactagaaggctctgctgagggaggggcaagatggggccagttagatagaaattagagtgatgtggtattataagcttcactgaaataagcagagtcaatattgcttacaatggcacccaccgaaacacaagaagccagccacctcttatggggaccacagtcacttgggtttagaagctctctccctcctggtttaacacacagccctttgcaccccttggtgcaggggtgatgtccaccaggtcacaggccactgtcgtctctcctgcattctatctcattccctttttcctttgtcttctggctgcctctgctagaacactcagaagagacctctgctctgtcacgaatgctctgtgagaacctgggaagtttgttctgggcctcagtttccacggcattaaaaagtctctgggctaggggttgggccaggtctagggcaggtaaactggctgtaaggggccaggtgaatattggaggcattgcaggccaagagggcaactcaagtcctcactctggggctgacttcggcagtgggccgagcaccatctctgtcacagcatctcagctctgccgtcgcaacacgggagcagccacggacagcataaaccagggagctggctgtgtgccagtaagacttaatgctggaaactgggatttcacatgtcatgaaatagtcttcttttggtatttttgccccccaaccatgtagaaagtgaatcgcttcatctcacccaggagtccagcctgtaggtcaagtatggcctgccacctgtgtctgtacaatctgcaaactaagaatagttttaactttctgaaaaactttccaaaaaaaatttttgtatacatagagatgaggtctcactatgttgcccaggctggttgcaaactcctgagctcaagtgatgctcttgcctcggcctcccaaagtgctaggattacaggcgtgagccactgcgcccggccagttataaactttaaggaaaaggacactttctaaaagtgaaatctcccacagagtcccgctctataaaacccataaagtggagctgctcttgatgagagtgaggggaagagcctttctgccacccgctgccaagaaagcccctgaggcccccgtccctgtgtatgtgtgtcactgagtgcctggagaagctgcatccccaactcccatacctggcgccaggtgtggtgatggcagcattccttatcctaggaagggtcaggtaataaatattttgggcttgcaggtggcacagtctctgttacatgttctttgttactgttttttaaccctttaaagtagtcagaacctttcttagtgtgtggccagatttggcttgcacattgttttctgggctgtatctttttttttttttttttttaaaggcagagtcttgttctgtcactcaggctggagtgcagtggcacgatctcagctcactgtaacctccacctcccgggttcaagcgattctcctgcctcagccttctgagtagctgggactataggcgcacgctaccacacccggctaatttttgtatttttagtagagatggggtttcaccatattggtcaggctggtctcgaactcctgacctcaggtgatcacccacctcagcctcccaaagtgctgggattacagtcgtgagccactgcacccagcctccaggccttgtcttttatttttttgttttttctgagacagagtcttgctctgtcacccaggctggagtacagtggtgcaatctcgactcactgcaacctccgcctcccgggttcaagcgattctcatgcctcagcctcccaagttgcagggattataggtgcctgccaccacacctggctaatttttgtgttttttggtagagatggggtttcatcatgttggccagggtggtctcaaactccaaacgccttggcctcccacagtgctgggattacaggcatgagccaccgcgcccggccttcgggccctgtcttgataaagaaccaaagtgggccccaagctgcagttgaggagaaactcagcatgagttttctctcctgcagaagtcactaaagaaatgcttggttcttcactgattcaggccaggtagagggatggtctggaggaacgactgtgtggggttagggaataccatgtctcatgcaatactgggttcagtattttgctcttaggatgggtcggagtccagtacaactgtggggtaatggatcgtagccatagaggtatacattttaggcagccattgctgcacacctgccgcatgcctgcacacctgccgcattgctacacagatggccgaggccagggttccaccagcaaggagattgcagtgtcctaaagacaaacagacacactgtaatgaaacctgcacacatcaggactctttcttgtcacctttgtattcctggctcctagtacagtcccaggaacattatagttgggcactaaatatttaatgtgcatgaatgaatgtgagcaaagggtgataccatgccaagtgctgtgataaagcccagatgggggcctctgcatccacctgggggacaggaggaagagtctctggaagaaggtcgtcagggctgggttttgagccagaactatcccagcagagaccaggagcatggggctcttagcagttcaaggagggtgatgtgaggcagcgaggccaagctctaatcagaccgtgggcaacttgcttaacaagctgggccctggttttctccgtgacgaaagaaaaggctccactaggtggacactggcattcagaacatcattccagattccccaaaaaccatatagtcccaccttctcatttcacaggcaggaaactgagtcacagatggggctgttccctgcccagccccttcgaggaaagcatgcgggctttcctttcctgaatgagtctgtgtcaaagcttcctgttcacagtgtttactttctacacgcttgccccctaattctcactttctcttttctttccattgatcttgtcacttttttattttcggggggtggcggatgtgctgttctgtcatctcccactttcccatcacctgattcctccacctgtccacacgtgcctgactccatcacatgccggggccggactgcgctcttcccacgcctggtggaatggtcgctgggcactcccagtcgctggaggagccgctactatggaaaaggacgctacggccaccctgactttaagagctcctgtccgattctggaggaatagtgtgttcctgttacttccttcgctggctgcctgtctctggttttcctgacacaagccctgcttcctttctgtcgccgcttcccagcttctcccatctttgtgtcatttattctcgcaaaccaaagtgaggtttctgcagctgaaatggcttccagcaagggtcacacaggcttgcatttttcgctgggtgagagaagagccacagcatgtggcggggcctttgtccacaccatgagtgaatgggtggcttgtccctgggtcggagaaaattctggtcattgatttgagcccccaggatcccagtccccctggccagagctcaagagaagagaatccagttaagcagaaatactcttggaagtagattttactcgtcaagggctaaggagctgtgggcatgttccatcctctttataaacgtgctgcaactgtgccctgcgggagcttagagagggttctttgtgcccaggatcccttctgagcatgcagtgcagccaagcctgggggatggagtccaggatggccctttctctctggaagagaaagggagtcccctgcccagctgctctggccagacctctagctcccgacaggctctgcattggggctatgattctgatgctgttctttgctttcttctctttccctctgtaggttgtaggcctggctgccttgcatgcaccaggggctttcttcctcctaatcaacaactcagcaccgtgacttctgctaaaatgcaaaatgagatgcgggcactaacccaggggatgccacctctgctgctccagtcgtctctctcgaggctacttcttttgctttgttttaaaaactggccctctgccctctccacgtggcctgcatatgcccaagtaactgctctcagaggatcccactaactgagctccctccaaggcagtctgggcagcttctaactaccttcctggacatgactgattgctcccgtgttcttctgagggctggtcttgtttttgtttgggtggctctgtctcactgctaacaccttagtgagatgccttccaccctcctgagcacaccagcctcccactgggtgtgtgcctagtgcggggcgggcggaggttgggagggtgttggcttggcttttaacctgtggggattttgtccaacaaggagtggaatgatttcagagctgccctgaggctggcaccctggtcacaggaaccctctgcgctggctcctgtctcagtcccctctgtagagttagatcagaagacacagaaagttctgtggccatgaaagataccagcttggaagggttgtgtcttcagtggcaccctcagaaaaattgtcttaaagcaaagaggtacctggctccagacaatttttctgatgaaaacaaagtctctgccccgtccccaccctgccaccctggcaaagttacttcctttacagctgcccagtgtaccatagaccagaccccaggtcagcatttgtcaagagcatggctgctgagtcccctgtggcagtcaatgcactgtttaccaaatgcaggtttctgttctccctccccagcaagacctgctgaacccagatctctggaatggggccctaggaatttgcatttcaacctgcttcccaggtggccctgatgcaccccagtattagagtttattgctaaaaggaacatgccctgtcactcctggtatcctgggagtcatgtttctcttctctctcagttctacttggagcaagagctttcctgggctgcaaatgagaaaacaattcctaggaacccacagcagtactgagcatgctgggagcttgggacttggagatgaatgagccaccgttgctgctccaagtaggactacttggagtgtagctgaggccttggacgcagtatgaccaggggcagctctgccagggctgttggccaatcagtcattttcatttcttgttggaggccaggtcctctgctgaactcatttcctagctagtgttaccctaattctgatgaagatcaatggggctataattcttgtttttgttcctctttgcagcattaacagcagcaaagttgtaccccggtttgaaaggtttggcttgggcgtcctggagtccagtaatccaaagatgtagccagccatatggtttttcgctgctgatctctttctttttaaaatgtgtttctgaaacatcccaacaaccaccacgacaaaaaaacactgcctgcccagcgctgcaaaccaggagcacacgtcctagattcagactgttggccataaaccccactcgggagatggagctgcacctgctatttcttaaaatgacaccaccaacaaccaaacctgtcatgacagacagcaaatgtttacacgtatatttctcctgagtgaacctgatgttttacaataggtaataataaaaacagtctgtgcagatgcactggcactgacggccaggatggcggaaatggccatcccctctgaggaccttgtaggcggtgagggacccatgctgggccagaaggaagacaaacatggtaattgcagctgttcttggggtagggcggggagcccagaaggtctgatctggcctctgctttttggcccaagactccatcagggaaatctatctagggctctccccttgtcctttcaaagggatactgccccttcctcgtcttgcagaggaaaccctggctaggaactgagctagtttatggagtctggaattcctggagagcttgggttcaccttctcacccctgtaatccaggctgctcctgctggaaaagtagaaacagaatccaaaaaaggtctggactcacccggtggttcccagccagggtttctgctgcaaggtgaggaaacatccatggcttgtacagatgtgagtctttgatgaagcccccaggcaggcaccaaggtgatgggactcagggccttggcttttagatacatcccagtccctgactgacatctgaccatgagggctggatgggtgggaacaaggaggagtagatggcaaaagtacctgagcccacttcccagccacagggtgaccctggcactgtaaaaaccctttgtcagtcatgccagaaggttctagaactgcccacctcttccatttcagtcctgctgaaaccccttagcctatttccgactcctctgtccatgctctgagttcagctgggcagtgtgtgggctatcacccctttcatttagacctacctagctggcccccatctgcagagccttccttagcaccattaggccttctacttgtgtccatttgaagcaggaggggctggatttggaaaagtctttgaagtgagagcaccacgcttgtcttcgttagaaactcttaactgcagaaaaaagttccagatggcaagggagcccttaagtggagattaggttgcattagactccaaaaccagaaaggaaaaagggtgatgggagtggagacgtgattggattcaggcccagaacctgtgaccatgctctgagctcagacttggggagggaggggtgtggctcccaccccttccagttaagacctgcctagcagagccccagtctccagccccttccctagcaccagagtctggtcaaaatgccacagaaaatgagctgctctgccagcaagctgtggagctgcctcctctccaggcctggcatcccttggtcagcccctcctgggagggcacagccgtattacagtgccagtgtgcctggccatcagcatcttcacccttcccagtctgtgtggggaggctgtaaaccccgtggattcagctccgtgtggagtttctgtgctatggtgggactgctcattttgccccatcatccctttggcctcccacacacctgccccttcccagggatcacgtgtgtctccagcctttcacctttctattgcaatggtggcctttgtccaggcaagagcaggcctgatggatgtactggtgagccccacagttggatgtcagctcagccgtccaactgggaggaacagtaggctcagttcctccctgacccctgacaccaggccgcagtgggcatgcacaggcccacagaaagtcagtctgggttttgcttttctcgtgagcatcacagttaaagaagcgctcattgagcaactacagtgcacttggtcttctgcaagtgctgggcacctagagataggaacagtcatggtccctgctcttaaggaactgatgacctggtggggccctgttgtcttcaaggaacccagaagccactgggccccaaaggtggaactgaaggactgggggcagctggctctcagcctgccacctctgcactgcctgcctttaaagaaccccaccccaccccatgatggccccctctgttccccttgtatttcagtgactgtgaattgaggttaggaaggcacacctgcccttctgtgtgctctctccacacgaaggatgacagatactgtgaattcagccctcacggccaactgtgaaggggatggagaaggctgggagggctcggggagagctcttaggggctgcggaagtccccacgggggtctgagagtggagcccaagctttggccctccaggcatccccagtttccagcctcacctctgaagccctgctgcctttaaccaccagagccgcagccccctgggtttctgtctaactcgaagtcttgaatcctagctagtttggggttgtgagcagtgtgtagcaaagttgatctctccatgtcaccaaatcaaaacaccctctgtcatcctacggcatttcctcttgaggtcacagagaggaatggcaagccctggaaacctgtgttattctgtgttgatttggtgtggggggagggtggagacgtaaatgtgaagccagttggagtttgtgctatgcagcagtgttagccaggatctcatcagcgtgcaaacctagcatcttctgtggccacaagccacacacttgctttttttgaatgtgatgtaaaatttgtacagtaaagtttttatattttctatcaactacatttgtcttccagacatgctattaatttaaattaaaatggttagtattaacaaacatgctgtatcgggtttttttgccactggcaagaacatgccctctgtgctaagccaggcctgggtgtctggagtttgtgaataaagttataccaaggtgttctggggcttgtctttgctttggtcagttccagctgagtcctggggaccatttggatgggtggcatgggaatggataggtctggggtgactgaacccctggtctatagattaaggagctccttccaaaggaagaagttatgccaggacctcagtggcaggtgtttctaaacagatggaggaatggagaaggcacagcgtcaatggcccacaatgcgcagaggaagatcatccaggccccagcagcaacaaagccatgagcaggcccagcatctcctgagctggagatgccttagccttatggaagccttggagggatgaggtggtgttcatctgaatccaatatctaggagcccctcattgccagttatatatacagataggtggagaagaggtactttctaaacaccatctcactttaatcctcacaaggccatgaggtaagaattgtgatgtttcagctgaggaaaatgagaaacggagaggttaaggtattcacccaagatcacacagctgcagggtggccaatccaggactcaggccacagctttcactccagaatctctccagaagtctaggaatttgctggtcagacatttactgagcacctactatgttcataagacagtgctaggttgtggagcattttccaggataggccgcgtggtaggccacacattaagtctcaatagatttaaacataacatacaaagcatcttctccaaccacaataggatgaagttaggcagcggcactagattctcataggggcacaaaccctattgtgaactacacatgtgaaggatctaggttgtgcgctccttaggagaatctgagtctaatgcctgatgatctaaggtggaaaagtttcatcctgaaatcattgtatatccctttccatccgtgaaaaattgccctccatgaaactggtccctggtgccaaaaagtttggtgactgctgccttaaactactactggatttactgagtgaggcaaaccaagtactgttttgtcatagtctgtttacaggagagagttgcactgttaatttgccattaggaagcagttagaaccatatatctgactttatggaggtagaatacgctcaaagagaatgttctcagtgggggggatgtgcatgcatgttttagtgattaatgtggttcagtacggctgtaccaatacaatgaggtttccaaagggaactggacaagacgacccagggccccctgcattgtacgacaggactcaggtgtctgcgggcatcactgactgccctgccgaggccctctgtgctggaggtgtcactgcagatggaaggattccttcttgaggaagtctactactggcgaaggtgaatgggtctgggcgcaggatcagtgcagtccaggagtgactctaaaggtgctggtgtgtgggcactacgtgcggagctcagccccaagtccttttcatgcattagcccatttaatccccacagcatctctctaaggttcacattcatttgcctcattttatgggtgaggaaaggaagcttggagaaattaaggaacttattgaagatcacacaagaattaaatgacagggccaagattcaaacgtgggctatttgtactatctatagaattgtatgtctggcccacattttgttgaccactcatccattgatggacatgcgttgctttcacctcttggcttttgtgaatgatgctcctacaaacatgggtgttcacatgtctctttgagttcctgtttttggttatttgggggatatacccagaagtggaattgctggatcatatagtaattctatgttgagatttttgagtaacagccatgctgttttcacagagttccagtttacccacaatctagccaacagttgttatttcctggattttttttttttttttaatcacagccatcctaatgagtgtgaggtggcagactcacattttgaaaagatccctcagtctacagggcagagaacagagcctccgagacaggtctgcgactttgaatactagagctctgagaagaaacattcacgagggctgcttctcatctcctgaagaccagggttaaccactgcgaatggattgtggtgactgaagggtgccggcactgtgcctcaaagtgtctccctactgtgttgattggtctaaaaacacatcagcctttgggtatgaccttactggggcccctccaggcagggtgtggagcagaggaccctcctttataggctggactcaatagtgaggctgcttacctgtgactcacctccaaggctcaaggtgatgctaaggtgctgatttgctagaactctgagctgtgcctgtgtctccttgggctctgggagattttttcttttagcagtattttatggaaatattgtctaggtagagtaaaatgtacagatcctggttttctgttttgagttttgttttgagacagggtcctgctctgtcacccaagctggagtgcagcggcatggtcatagctcactgtggcctcaaccacccaggctcaagcaatcctcctgcctcagccttcctgtagccaggactacaggtgtgcaccacaatgccccactaatttttttgatttttagtagagacaaggtctcgccatgctgcccaggctggtctcgaactcctgggctcaagcaatcctcccgcctcagcctcccaatgtgctgaattacaggtgtcagccactgcacccagcctcagcctgttgttaatggatgtaaatacctgtgtgatcgccacccagaaccagatccagaacatttccagcctctcaaagactccttcctgcccctcccagtcagagacccccaagggtgacgccattctggcctgttgttcaacttgacttgaacaacacttcaagtcaagtttggatctggcttcttctgctcagttgcgaggcccattgatgtttcctgtggcctagctcctttttattgccgagggctactctgttgtatgaaaaccacaattcatttctcccttctcctttggtgaacatttgcactgtttccagcctggggcaatgatgagtaaagctgttaaaaacaggcacatatgttttcctttctcttgggtaattttttagaagtagaaaagccagaacatagaagtagatatttgactgtattacaactcaccaagcagtttttctttttattttttatttttcaattttttgagacagagtcttgctctattacccaggctggagtgcagtggcgtgatgagggttcactacagccttgacctcctggggtcaagtgagcctcccacctcagcctcccatgtagctgagaccacaggtgtgcaccaccacacctggctaatttgtttgttaaattatatgtagggacagggtcttccaacctttcccgagctggtctcaagctcctgggctgaagtgatcctcctgcctcagcctctcaaagtgctggtattataggcataagccaccacgccctgcccatttttctaagttggattattttacactccagtctgctgtgaatgagagttccagttgttgcgtatcgcaatcaatttgtgattgcctacaaatgatgtgccgtgatgaaattgtccctggtgtccgagaggatcgcaaagaatttcccttcctttctctcctttctgctccccttgtactgtctactccttaaactggtacttgatccaggaacataatggggatggacagtgcagatggcacacatggcctcagtctattggagcatctcaaaggaattagtctgcaaattctagtgcatctaggtggagcacaggaaggaagagaggtgcagactcacgtatggccctggggcacctgccatcctctcgcacccgtacagcccttacctgccagcacttaccctacccagcttgagttctgggccttctcaccagcacatcgctgggacctggtcgacttcaggtaagtttatttcatggctccctcccccacgacctgcacatgccatatgttccttcccagccccatgtcacttgaaatgttctatcatgtccaagacttctctcctcatcctaaagtgcagaaaataaggatggagaagagaaggagaagagaatcaagagagattcattgagagggaggatcagaagctcctgggcaccccatactgtagaataaaaatattcattatggtgtttttcttgcaaaatattcccctctacataattatgtttttacatgaataatataaatttaaacaggagaaatactttttgaagagtctgagaatcttcataaagttcaggcggccacgaattagctgtgtgacctggggcatgccccttagactctgagcctcagcttctctgtatgtaaaatgggttgaagccgcccttccccacaagcaccctgtgcacaggcaatgcccagccccattattttctggactccgtggccaagcatgcttaggacacacagccacatacttctgggcagtgtcatctggcaacttgctgtcatgtcagtgtggtcaagcattgtagacctctatgaaccaaatatgcttcaggcttgggttgagcacaggagagggaggagggaaaggtcactggggctgggagtgcctacttccctctgtgagtgtcaccccagtccacccagtaccatacctttctctctctggacccacttccttttgctgccggctcctccccattgaataacagccaagttgctttggtttctatttctttgttaagtcgttccctctacaaaggacttcctagtgggtgtgaaaggcagcggtggccacagaggcggcggagagatggccttcagcggttcccaggctccctacctgagtccagtgagttccagggctatgggcacagggctgcctcagccagagggacacagctctggggctctgaggaagcaactcctgggtggcaggggatgggggtgggggcatcccaaagagaacacaagcagggcagaaatatcagaggaggtcatcctggcacacctgtgccgtgctgagctcactcatgcctggagggatgctccttcccacgagtcatggctttgacagtgttgactgagctgtcctgtcctgtcctgtcctgtgtgctcaggggaagacatgtagagcggggtggttcatgtaaagaggaagcaagcacgcttctgggacagtaaggacgctacccggcatggtagttaagggtgcttactgtgaaggtggcctccctgggtccagctatttactggctggtggtctctgggcctcagtttccatatctgtgaagtgggaataatacttgagccccccactcccagggttgggatatggattaaggaagtagtgtatctagtgtgtttgaacagtgcctgacacactgtaggtgctttgggagtgtttcatgttattgggtgtctgagggcagcagggaagacctcccgaggaggtgtctgtgctctgaaggttgggcatgggcatgttcagggcatctgtggaggggcagtctcagaggtgagaggggggtgaggactgtccctgcagcgtggggtcagagggcggcaggtgccttgctgaaaccctgtgaggtttatgagtccccttcatacacggaaaatctgaggctcagggaggcagaggccagttgccaaatgcctccagatgggagtggcagccccaggagcccaggagacttcaggggtcactgtgtcctgggccggctcctgtcataggatctcaccccgccttggcaaagagcttcccgaggggctggagagggtgggctgatgggtccttcctgggtggggaggcagggtggggagggtgggcagaggcagggtactgagggagggaagctgccatggcccacctcagcagaggccagggtcgggcttgagtgccccctggtgacactgagtccagaatgaggctgcctacgttctggtctgcagagctcggctctgctttctaaactccagagagaaagaatggggaaaggaggcctgtttcctcctggctgtcaccaatgacacctcagccaccctgtggaggcccctgaggtaggacctgcacagagggggctgggggaagctggaacaggccgctggtgggggccttagggtcagcaggtgctgccttgggcatgtcaccctgtctctggttttctgtcaaagaggggatcccagagcttcttccaggttctgacatattattattctggtgactggtttttactttctaatccttggattcagaaggaaaattatcctacggacatcagagagttaaaacagggccttggagtccagacaagaaagatgatcagtgcagcccctatgggtgtccagagtacccctctaccccacgggggctcccctgggttgggacaattaagcctcacttggtgacccatctggcagtcggagccacgcttcctccacatgccgacagtgggggaaggtcacgcggttcgctgtcctgctgaggagggctgagtgccatgagggcctggcttggaaacctcactcccacttcttgtctggcctcatctagcccagcctctttggagggcctgggggaagctggaaccacgtgctgtgtggtccaggaagcactgggagagccaggaataaggatgttctcagcttactcatgagaggaagcctgtgtggtggttagaagcgtgggtgctggggttcaaatcccagctctgttgctgaccagttgtgtaactttgagcaagtgactgaacttttctgtgcctcagtttcctcatctgtaaaagtggccggggttgctgtgaggataaatgttcctagtcatgcccagagccctcatggacacacatggatccaaatgccacagcagccttagctggtcaacctcaaaacaacacatttgttcttacagtgttggaggtcagaagtctaaaatcaaagtgtcatggaaggtggccagcaggaccatggagcctctgaggcagcggggcaccttggctaagagccacgtactggcctcctgctggcacgcagtcttggccagccaggctgagctccccacttcggggtcgggcctgggtgtcctctggtgatgctgagtccaaaacaaggctgcccacattttggttcacagggctcagctctgctttctagacttccagataagaagaggaggaaaagtccccggtctctgggcactatcaggaacagagagcaagtcatgactcagcagagggatcgatttgttcaatgcaaagagctgcactgtcatgtctgacatgagccaggggctcagcacacggaatcgcacccagtcctctcagaacgctgccagccaggggctcagcacacagcgttgcacccagtcctctccagaacactgtcgggtggtgttactgtcctgccattcagaggagggaactggggcacaggcaggtcaagtgacttggccagtgtcagaattgctagtgtacagagctgggaggcaagcccagtcccgtgggaccataaatccagtgtgaaaatccatcctcctgcaccacatggaacaaaagcaggtccggttgttttcctgggttttctggacacacttatccaaattccacagcagccttggctggccaatcttaaaacaacaaatttgctctcttaatgattttgaaggtcagatgttaaaatcaatgtgtcagcaaagttgtttccttctggaggccccaggggaaaatctgtttcttttccttttccatcttctagaggctgcctgcaggccttggcttatgacccctcctgccatctttaaaaccagcagctttggctgggcccagtggctcatgcctataatcccagcactttgagaagccgaggcaggaggatctccttaatccaggagtttgagaccagcctgggccacaaagtgagaccacgtctctacaaaaaatagacaaacattagccaggtgtggtggtgcatgcctgtagtcctagctacctgggaggcggaggtgggagggtcacgtgagcctgaggaagtggaggctacagtgagctgagatcgcgtcaacacactccagcctggctgacagaatgagatcctgtctcaaaaaaaacaaaaaacaaaaaacgaaaacaaacaaaaaccccccaaaaacgcaaaccagcttcttcttgcttctgtgcttctgttgtcacatctcctacctctgacactgatcctcctgccttccttttataggatccttgtgatcacattgggaccacctttaaaatcaggacaatctccccatgccaaaattactaatttaatcacatctacaaagtcccttctacaacatattcacagtttccggggattcgaatgtggatgtttctggggggtggcccactggtaaccagtgttataagtttcttataaatccttccagatatattttatctataaataaataaatgcaagtccatagacttcccccacccactttttatacaaatggcatcattccatatcagtgctcagagttctgtcttcctctttttcttttctttttaaggctacacagaacctattaaatggaaataccctaatttatttcacctttttcctgtcagaggacttttaagctctttccaatgctttgctttataatcctttgtgttataatgctgcaatgaataaccttgtttgtaggatgatattcaatttaaaaactcatttttcaggccaggcatgatggttcatgcctgaaatcttggccctttgggaggccgagccggaaggatcacttgagctagcccaggcaacacatagagaccccatctttacaaaaaatattgtaagattagtgggacatggtggcctgcacctattttgtcccagctattcgggaggttgaggcgggaggattacttgagccagggggtggaggctgcagtgaaccatgatcacagccctcactgaactccagcctgggcaacagagtgagaacccatctctaaataaataaataaataaataaataaataaataaataaataaataatcttgtttttccgaattttgggggcactatttaagatattttgaaacctcacagagcttttttggggaacttgttgccttggagattagcctgtcctgtcccgcccccatgatctgtacttcctctttctccctcctggcttccttaattaagccttgtgtgtacttgccagcccatgtccatcacgctctgccttcaattctagatgctgtgctgtgaatacacttaagtggaggccgcatgcttcccaggagggtgtgtattttcagtgttgtgtctcatgatagtatgaaaggctctggagagaatcacaggcttccacaaacaggcaaggagaaaaatgttccacagacatgtttcagggaaaacaggcttcccaatcctaggccgtgctggtccataattggatcaggctgactctccttcccctacactgctggtgtagacagggacaagaatgagaagtcagagacacagagaagctgtgatttgcttgaggtcactaaagtacttaatggcagagttcagacctgacctgaggggcaacaaaagacacccccctcaaatccatggggagcagagtctaactgaatcagatcccagatttcctggggctctcacggtgccaggtgtgtacactgagctaggatgggtttcccagggttctgtgtggtcacacaactcaacaatacagaccagaaagcagtggcaagtaggctgaatttggctggtgggtgttttctgtttggcctgcacagtgtttcttttaacgttttattataggaaattcaaacatgcagaaggaattgtaccatcaacaacacacacccatcactctgctccaacaatgatcaactcaggcctatcttgcttcatcctataccctccctcgcttgcttccttcccaccctcagatatgtggaagcaaatccaaagataccattccatttcaaatatttcattttgtatctctataatatgggaatttggggggtttcaagacaggatttcactttgttgcccaggctggagtacagtggtgtgatcatggctcactgcagcctccacctcccaggctcaagggatcctcccacctcagcctcccaagtaactagagttaaaggtgtgcaccaccacacctagctattttttttttattttttgtagagatgggggtcccattacgttgttcaggctggcctcaaactcctgggctcaagtgatccttctgcctcagcctcccaaagtgctgggattatagatgtgagccactgtgcccagccaggagcttttacataatcctttttgacaaattttcccccaagaaattagaaagttttatagaaaaaaaaaatccggacttctgtcttctcttaaaaatttggaagctctgccaatactgggcccagatggcaatcactgcttagcacggagtagatgttgacttttcagatgaggggtgtgacatctactttgccacagtccccaccactcccccacctggccatctcacccatacacatcacctgcctggctcctttaggcatttaatttgtgtaggaaattgacctaaaggagatattagagaagacattaaaaacttgaagaatgtgaaaatcagccaggagatagaactgtgctttaatgcgggttatagaacgacattggatatgaagcattttgggaataaactttgaaaattggaagtaccagtttgtgaattttgctgagagagatgaaggtggggggtgggtgacagtggtgaagcatctcctatgtgccagtctcttttaccacaggctgtttctcacaaaatcatcaatcatatgcagcaggtgaaacaccttcctattttacagatgaggaaactgaggcacagagaggtgaaataggcttcccaaggtcactcaggtcatgagcagcagagctaggattcagacctggagttggcctgactctaaaacgatgcatgcctcaccatggcccatcactcctttaaagagcaccagaagagagaatttgacaaagtggttgcccgtggggcctgggatgggtggggaaaccacgctaggcctcggggctgctgagggcctgagggaaggaatggggagcccgggcacagaaatagaggagggggctgccccacggctacagaaggcatctgggaagacgctctgctgaaggtggccaggagggcaaaggtcacagtggccattgttatatggtggtggtggggagagggggatggcttcttcttaacctcctcgggtgagtcgaaggtttaccctccagacccttgatgggtccctttggtcccttgggcttcctgagtctccagccagggcctgggacctttgctgggagcttagcatggggtccagcagcccccattgctacctaattccttagcagcccagggtgtctgcctgctacttccctgcctggaaggaaggccttctgcctggtgcattcctgctgcagcctccactgcctcttagactctcacacaagctcagctccctgtcgcgtcctctcagggccaggcttctccttatcacaagcttagactgtctgagtaactaattggatttgtgtttgcctccacacaggaccctaagacccgtggggctgcgactccctctgtactggtcacagccgcaccctatccccttgcatggggctgtcaaacccaggctggccactgactagcgctggaggggagcaaacgggaggccggccacctgactgatgttcccacaccttctccctgcaggctgtccccttttctgggactattcaaggaggtctccaggacggacttcagatcactgtcaatgggaccgttctcagctccagtggaaccaggtgtgtgtgtatatggatggaaacgtttcactccagcctcgtcccttagtaaaccactgtgcctgtgagcctgggttagttcaaacagcaacatccaagctcacgtgcctggctcaggggaggcccaatgcgtccctaacccatgccacagggcagcactccacaggcacaacctgcacccaggggtgccattaacctggactccaggatgaatggggccctgggagctgacggtctaaggagggcgtgggatggtcagagttggatgattatgttctgggttgaaccttgcacactgtgactaagagttgcaaaaatcaaacttcctccatttcccgtaactgctctcatccactctgaagctctccttctgctgatgtgaaaatattgaaaattgccatcaaaagtaatttggtctcttttggtttcaaggccttttctagaaactactaagtcaattcaacatactaacattgtatcagggctgtttcccaccccctcctccctcccaaggtgggctgtctgggaacagagaagagctcacatggcttctcagtggctgggagggctctagaccctcactcaggcctggctgacccctgccgaggcaccccgaccgggtggcacagaggtgtgcagctctctcctggtttagtgggggaccatgggtggctgcctgctgaactctgcggggcccacagaagagcctctggactcatgactctctctcggaagcctctctgcctcagtcccaggggacctctccttaagaccttctgggcctcacagatcccagctaaacctcagcttggacacctagattcttggtgacctcctccgccattgccatcctgctgtgggacttctctgagagactgcggtgccctcaggagatgccaagggcagggaggccccgatctccctgaaccctccaaccaggggaatcaggaccatgaccctgatcttccgccccttcctctctccctctccctccacctcccccaccccccagcaccaggagggcttcccactcccatcctgtcatatagagacagatcctacctcagagggccctctcctcttgggagctttctgtctctcccttccttggggcaggaatttcgaaaggactacagggatgaagctgaaggactccaaaggaaaaaatacatgcagatatatttcaaatgcaatcttctccatttattcatttaattaattaatttttttcttttgagacagggactttctttcacccagcctggagttcagtggtatgatcatagctcactgcagcctcaaattcctgggcttgagtgatcctcccatctcagcctccggagcagctgggactacaggagtgcactatgatgcccagctaattattattattattattttgagatggagtctcgctctgccaccaggctggagtgctgtggcgctatctgggctcactacaacctccgcctcctgggttcaagtgattctcctgcctcagcctcctgagtagctgggactacaggctcatgccaccatgcctggctcattttttgtatttttagtcgagacggggttttaccatgttggccaggatggtctcgaactccagacctcgtgatccacatgcctcagcctcccaaagtgctgggattacaggcgtgagccatcatgcccagccaatttttttttttttaactagagatgagctctcactatgttgcccaggctggtctcaaactcctgggctcaagtggtccacccgccttggcctctgcgcccagccccaatttcacatgctctttacatttgttctcttctttcccatttaatcaggcatgtgctggcctccaacaagtgtccactggcacagaaggctctctcttctaggtgtgcttaacaacttccatcttcggtatcaattggtaatcactttccaagacctatgtttcttgtttgctaataccagcacttttccttaaccgttttctatttgcttttagcaaatcatgctgtaaaggcaaaatccaataattaaaacaaaaacacattagatcccaattagaaaaacaaaaacgatgccaacaaagcagtctctgccatacaggttgtgtgcaagatccagacaaatgcaaagcacaggcgccgaggccctcctgtgcctgtcactggcaataatccatgccacagaagactatttgctttccctgggcctaggtttgctgtgaactttcagactggcttcagtggaaatgacattgccttccacttcaaccctcggtttgaagatggagggtacgtggtgtgcaacacgaggcagaacggaagctgggggcccgaggagaggaagacacacatgcctttccagaaggggatgccctttgacctctgcttcctggtgcagagctcagatttcaaggtgagcaagaatcccctccccacctctcacccctgggacccccagccctatcaggtgaatggcctttaagtaatcacctaaattgacattcagccagagtgacaccactatacagataacacgctcatttccttgtgaggtgttacccatggctgcctagtctccttatgcaccttcatctgaatctacaggtgcacctgctgcttcttttactctgaaaataagaactagaggagtcatcacgttgctatttggtgttgtgtgtctttgaattccaagctcattccattcctctgctatagccattcctcctctccaggtcactggtaacatttatttttcagcgacatcgttccagcctttatccagggtctattaagggtatagttttgtaagcacattgcaaattacccttgcaagcagagtaggtctctgggcttgagaagcctgtgggtaagtcagtccaagtatgcttatctgagataaggatgtccccattcgttcagtatgcaacctgaggtcacctctcctctgctccccatgagcattttatgcatatataaataataccgctgcagccataaaaaggaatgagatcatgtcctttgcaggaacatggatggagctggaagcctttatccttaaactaacgcaggagcagaaaaccaaacaccacatgttcttacttataagtaggagctgaacgatgagaacacatggacaaaatggggggaaacaacacacccttgggcctggtcggagagggagagcatcaggaagattagctaatggatgctgggcttgataccaaggtgatgggttgatctctgcagcaaaccaccatggcacccgtttacctagttaacaaatctgcacatcctgtacttgcaccctggaacttaaaatcaaagttgaaggggatggaaatggcagatcacgcctataatctcagcactttgggaggctgaggagggcggatcgcttcaggtcaggagtccaagaccagcctggccaacatggtgaaaccccatctctactaaaaatacaaaaattagctgggtatggtggtgggctcctgtaatcccagctactcgggaggctgaggcacgagaatcacttgacccactgcactccagcctgggcgacagactgacattccatctcaaaaaacaaaaaaaaacagttgaaggaaaaataaataattaataaatgaaaccccaggtgagctaagactagaaagacaaacctactgcaggaaacaaccagaagaacgaaaagtccaactggagcctggtagagactcgggttgatgcactttgggtcacacacacgttcctgtaactggccccacactgaagaccagactcaggtcttcattttctagaaagagggtccaggagctcaggggtggtccccatcccagcctgggatgcctcccccagaacatgtgctctcctctggcaggtgatggtgaacgggatcctcttcgtgcagtacttccaccgcgtgcccttccaccgtgtggacaccatctccgtcaatggctctgtgcagctgtcctacatcagcttccaggtcagactgtccacctggcaccggtcccaggggctgggatgcagggcccagcgtagctgtgtctaagccctgctgggtgggcccaagccaatctcctacccaggtcactctggggacaacctctgcttccctgtcccagtacctgcccgccccttctcctctgtcactctgcccctccttctgtgttactgtctctgtccggaacacctgccttggtctcccagactcctcagctgcccctttctcttcatccctcagtttccatcctggtaaggagggcatattgttctagaaagagcccaggctcaagaaccaaactgaatccagttcaaattcccagctctgccattcatcatctgtgggatcttagacaagcaacttcacctctctcagccttggtttcttcatctgtagaatggtcattgcctgccccccatgggtggttgtgtggttcagtgaggagacagatatcagaggtcacacagtggcccccctgggcccacaccagggtctgtttgacctctgtgttttaacaactttgaatgtgttgccaacatctaaaaggtcaggagagtcaggtatggtggtggaggtctgcagtcctggctactcaagaggctgaggtgggagaattgcttgagcccaggaattagagttctgtctgggcaaaacagcaagaccctgtctccaaaaaactttgtttaaataataaaataaaataaataaaactaaataaggtcaggagataccaataccatgtgaaaaatgggaagattagggtatgctgggcccacattcccacagggcaccagcagctgggtgggagctgctgttacccttttggcattcgaggctgctccctgagatcagcgaagcacacagtaggccctcagcaaatctgggcttctcgccctttggtcctcatctctcattccctccttccctgactctctcccctgcgggtggtaggggagggaagagctggagggagaccgcacccctgcactgctcaccagagcctggctctttcccatcccatcttggcagggccctaacccccttgcctcatcgccctgcctgcctggtctctccctcttgcccctgcctctgcctttcggcttctccttggctctattaatgcttctcctcactgcccggtgccttttgttttaacagaacccccgcacagtccctgttcagcctgccttctccacggtgccgttctcccagcctgtctgtttcccacccaggcccagggggcgcagacaaaaagtgagttcaacacagaggccctgggtggccgagcagacagtaggaaggaccgagggtctgagaggctggccccagccagcaggccactcagggcctacaggccgcatcttgcccacccaagagttccctgtctctgtccgctgggcacccagagctggggacctgggggtcaccctggattcttcactccctcttctttacgtctctccaaggcacgaacgtgtctccctcctgaagccaccgatgtggtccaggcctctgggattcctcaccatgacgacaggggtccagttccccaccccctacacccaaccactgccacagtgaccttcttataagcaaatgtgatcacaccctctccctgcttaaaaatcttcacagcccccagcccttcaaataaagcccaaattctccagcagggtatatgaattcctccccagtctgccccaatccacgtccctgcctcacccccaacccacgaagctcacgcagcctctgcagctcactcaaggccctcttgggccaccatgcttttgcatatgctgtccctggtcccggaagcaccctctgccagcctgcctcgagcacatgcctaattgcccttccatgctctgcctaagtgccgctcctctgggagtcctccccgcctggaatattgttggacgctcccctggtgtccccacagagtctgtatgtatctgtgccatgccagttcacagcaccccattgtaactgtatttgcgtgtctgtccccgttactccacccccatgtccctatgcccatgaggccccagagggccaggactgtggcttgttcatttgcactgtgcctggcactcagtagggactcagtgaatgaatgtggaatgtggttcacacagccagggagaatgggataccagccagggcaagaacagtctactgggtggggcaggatccaggacaaggaggtgagcagcccttcctccggccactcaagtagtggggactgggaggaggggcgctttgtctacgcagtcttcttatggctcatcaccgtacagacagggcacctgcctcctgccacgctgacttcaggactggtcgagccccagggaacatttgcagggcagcccaactttggccctggccctggcgctggccctggctctggggaggatagaaagtgtgctggatacagtcagacagaactggctgccactttggatttgatcccttccaccttggcaagcttgggcaagttgcttaatctttctgagcctcgttgcctcactagggacacaggagctgaggctgcttcccttgttggaaagcactgaagcccaggaatcgacccacaataggccttcaacaaataccacttctcaccttatgggtgaaatatggcactggaagtaatgctcttcgctgtgggagctacagaaagcaatgaggtctctatcaaacccagtctcctctctctcgagaggaaccagtggggataccctaccccccaaccccaaagccctgtacacctgggggtaaaaatctgggtgccacgggctcaggaaggcttgcttgggagcaagagggaggtgggtgtgtccggggaggcatttctgagcacaagagcctccctggagttttgccaccatctcctcccattctgtggtgcccgcgataaccaccattctgactctcctcacccctccagcctcccggcgtgtggcctgccaacccggctcccattgtaagtctcttgctttctttttggatcgtcctcattttggcttttctgggctcatggaggaggcagggccaggcattgggcctctcccattgggagtggggagggcacagaccagacccttgaccatctgcccggcctggtgaggttgggggttggatgtgggggttggatgaaacaacctgagttgccaccccgtgggcagccacggaagaccatgccccacattcacttctgtcacctgcaaagggaggctaggctgagagacgtttccccgagaggaaagatgggccagagccaccagcgtccccatctgtcttctccagggttctaacctttgcccctcgctcatccccttgagagaagagacacctgggcccaccctctgtggggtctgtggggccattgggcttgttacgccccctggagggtgcctgccgtgtggcgccctctggtgggagctggtggttttcacacgtgagagcctgggtgagacctggtttctttcttccagacccagacagtcatccacacagtgcagagcgcccctggacagatgttctctgtaagtctacaagttctggtcagttcacagctgcacagtgtcctccttcaccaaaaactaaactccctagagccctagagtcgggaagaaagcggtttagcaaggaggatggggacactaggggctgagtgcttggctcaggtgacatgtggctaaagctgtccttgggacagcagagattctggaagaagcagggtttatccagtggtggaagagacaagtcccctagagaccgggagggaaactggtccatctgtcaccaagtggggagtacagtggccccagcacccggatgtgaggttcctggccctgcatcctgggtccccaggatgtcactattgatcacaggcttaagctcttctcctgatggtgcaaatgaggcaggggggcttagaattagtggggctgcctgcggaggggttgaggggcaggtgaccgtggtgtggtctgggaacacggcaggaagttccaggaaggctaacatgaaaagggaggtagacgggcgagtccaagggccaaaggctcacgaggtcagcctcacagtggagtcctctctagaacgcgtgggtgcgcctgggtgagtgctcgcgcacccatgtgctctcccattgaatttcctggtttcttttcaacagactcccgccatcccacctatgatgtacccccaccccgcctatgtaagtggtttctcagggagggcagaggttctgtttgtggtgggcaggctgggggtgaagggccgctgtggggggatccactggccttgaaaaattaaaagcagtcatttgttaagctgaagggcttcaaagcatcccagcgaattagaaggctgtggagaggagctttcaaccttaaaactgtcgtgtcaatatgagcacattgcatgtccctcccttttcaccccacgaaacgagtctttttgtgtttggccaaagttcctttcatgacactaatctaagcccattaatttgaggagcactggaaagttttcctttggcttttatggaaccaagtaaagatatcatgggcttcttctcagctgacagcccaaattcatgggaactggtacaatcttccccttccgcgtggtggctgacctgtcccccttcttccgacagccgatgcctttcatcaccaccattctgggagggctgtacccatccaagtccatcctcctgtcaggcactgtcctgcccagtgctcagaggtaagccaagggctccagtgacctctgggaagagagagcccttcaaggtcagtccagccattcccctggcttcaggaaggctactgatgatggggaggaaatgggactcagaattcggtggataaaggttcaggtgggctgcccaccccaggttccacatcaacctgtgctctgggaaccacatcgccttccacctgaacccccgttttgatgagaatgctgtggtccgcaacacccagatcgacaactcctgggggtctgaggagcgaagtctgccccgaaaaatgcccttcgtccgtggccagagcttctcagtaaggcaccgcagtctggagcttggagaggctcccatgggtgcacagggggagggggtaaaggaggtttgaggtaccttgaacagtatgggggctgattcctctgggatgaaggcccaaaagaagagaaggtggccaacaaattattattattattactgtcccgcatgaaggaagtgctgggatctgctttttcagatgaggaaacaaactcacaagtgcaggttacttgcttgtggtcacacagtcagtaagtgtcaaatcagacccaagaaggaggtgttattcatttcttcatttactcaacaaccattttcttgtcgcctgctttgcgcaggaagcaccccacatgctgggggcacagtcatgaagcacacagacagggtcctgcctccagggagtttataatttaggtggggaaagaacaaggaaagtaaagcatggacagattgtcacagataacgacagtgccacgcacaaagcaaaacagagcgatgagatagagcgagcctgggaggggcagctagggccaacgtgcagaggcacgggtgtggcctgtccaggaacagcaggcaggcgtgctccaccctgactacatattcaaatcacccagagagcttacaaaggaaatatcagtgctgggaccccagcccaggccaatgaggcagtcagctgggcattcgtattttaaaaatatgccttaagtgattatactctgcagtcagagttgaaaatgactgatgtagggctttgcagccatggaaaggagcttggattttaacacagtgaaaagcctcaggagtgtttcaagccagggagcaacatactttgatttgtagacagctgtgtgacctcggacaagtgacttaattattctgtgcttcagtttcctcatctacaaaatggagctaataatcatgaatttcctagagttgtaagaatggaatgagacagtatctgtagtatgcttaggacagtgcctggcaggtggcatgtgtgataggagtgttagctattgcaaagggaaggaggttttaacatttgtaccctgactgcttcgtggagaaggcattggggtggaaaagacaagttaggagactgatgctgcaggagcccaggcccagagcactcctgtgtgctgggcctgagggatacagacggcacaggccagtgctcctgtccctgatggggtgggaacagtattctagaccagggaacagtacaggggaaagagcacgcacagcctgtttagtgaagagccgtcgttcagtggggatagagtgcaggtgaggggcttattaacaactgaggagggagggagggtgggagggagggagagaggaggctgcagtgagggtggaggacttcccaagtgtagtgcaaacggcatgatctctgcacaggtgtggatcttgtgtgaagctcactgcctcaaggtggccgtggatggtcagcacctgtttgaatactaccatcgcctgaggaacctgcccaccatcaacagactggaagtggggggcgacatccagctgacccatgtgcagacataggcggcttcctggccctggggccgggggctggggtgtggggcagtctgggtcctctcatcatccccacttcccaggcccagcctttccaaccctgcctgggatctgggctttaatgcagaggccatgtccttgtctggtcctgcttctggctacagccaccctggaacggagaaggcagctgacggggattgccttcctcagccgcagcagcacctggggctccagctgctggaatcctaccatcccaggaggcaggcacagccagggagaggggaggagtgggcagtgaagatgaagccccatgctcagtcccctcccatcccccacgcagctccaccccagtcccaagccaccagctgtctgctcctggtgggaggtggcctcctcagcccctcctctctgacctttaacctcactctcaccttgcaccgtgcaccaacccttcacccctcctggaaagcaggcctgatggcttcccactggcctccaccacctgaccagagtgttctcttcagaggactggctcctttcccagtgtccttaaaataaagaaatgaaaatgcttgttggcacattcatgtgggttgaccatggcttctttaattcatttggagacattttggagtctgtggaatcgggcgggggtgctgctgagaggagtgggatgggaaagcatggactccctttgggcagggggtcctgacctcacacctcctcccagagggtctcttgcaaatcccacgagggtgttggagaaagcaggctggggctctagccttttgggcaggagtctcggacacaggaagggtggtaatgggggacaccaggaaacagccccatgcctccgagatgggagaggggctggggcagagcctgtgagggccacagcagggtcagagctgcctcctcagacctggcgtcccagtgggaggaggtggcttggggaggggggtcaggagaagctgatccgaagcaccgtctgggtgtgtgttccattgtgggtctccccggcattaggggttagggcttgcgtgggaaaagtggctcagtgttcatgtgtggggttctgccagccactgggccactgcccaacagcccagctccgcgtccacgtgatgccaacacatcctgcttggctcagcaagaatccagttcctcaggccccagtgtagtcctcggagctggcagcaccagcagcaactgggagcttgttggaaacgcggcatcccgcgcaccgcccccctgccccgtgacacacacacatacctacctgagagatcagagccttcgttttcacaacaccccaggtgagacacacacattaaagctgagaagccggctgggcatggtggctcacgcctgtaatcccagcactttgggaggccgagacaggcagatcatctgaggtctggagtttgtgaccagtctggctaacatgacaaaaccccgtctctactaaaaataataataatttaaaaaaagtagccgggtgtggtggcgggcacctgtaatcccagctactcgggaggctgaggggggagaatcgcttgaacccaggaggcagatgttgcattgagccaataatgcgccattgcactccagcctgggtgacaagagtgaaattccgtctcaaaattaaaaacaaaacaaaacaacaacaacaacaaaaacacaaacctgagaagccccggtccgggagcggactcctggctgtgttgctgagatgcacggctgtcgcgcagggcacagagcttttctggagcctgaggttgacactacaccttctcctgccacctgagactctgctgctagaagagggaggggagagagaggggcgaagtcggctagggcggccaggaggcagacaccaaacccgagctgggagccgtgtgttgctaggaccccagcgtcccctgctgagctccttccttggttctgaccaggagaaggaaatggggctcagtctcttaagaagccttccttggccagctccaaacccgggagggtccccaatccctcagacgaggatgctgtggcccacacttgcctcgacatgttgccttcccagggaccacatccgtatgagacaaactcacatgggacaggtggccccagagcaaaacgctaagacagtgtctaagaagaagctcaaggccttcccagaagcgctggcctcatgtgagaatcccacccacgccagaccccgtttcagatcctttgtgagggaggcaggcctgtgccccctgccctaccacaggtctttggacaagcaacgaagctccatcttctgctgtcacacctggcagccatttcagaggagccatggcctgcctgggttgtccctctgtgggggatctgtccaggctgcgacacccaccagctccccactctgtataactgagggccacattccctacaaaacagcccccaacccccctcccccgccacacacacatacagtgtgattaaagtaaaatgcaattcatgtaaatatctccatcaaggaatcatacagggaagacccaagtggccgttgggaacagactgggtgttagttttttaaatacagaggcataaataactgtacacaaggcagttaaatacacagtggtgtgacagcacctcctggtggtcacttgaagtggtgcactcagcagcgggttccatctttcacccacttgccaggcctggcgttgaagatttcgtctccaagggaccaggaaggccccagcttgagagaggaggctctgatcaatccagggtgctacttggtaggaggtcaagtaaagggcttgatggggaatgaagtgaaaaaataagatgtgaggctgggggatatcactttcctccatctccccaggccctgtgacctcggataatgcagagctggctccgtggttaagttctgtgccggcagctttaacccctcctacgggccgtcagagcgctgacatctccaggctcctgggctgcactgccgccttgtctgcttgtagggaaatacagcaccaaagatatcttcgtgatagcacttctggctcttttaggtggaaacagagaccaaagtgtcaagtccaggctgggatgagcccccggggttgcccagcttccctatcacatggacctccatgagccatctgtcttcccaactgtcatactaagattgtgcttgaatctggtttagactctaacggccctcagcacctgctctggtgcgggccctctaaccatctccaaagctttacttagcatacccatttcctgcccagcactcatcccccacccaagatactccaggaggtgtgagctctgagataaatatgtttgggaaatgccacatcctttctttccttccagccttgaagggtcctgatgagcagcagcatgctgaaggcttccagaagtcttgtagtaaagcaacgtgtttgccttgccttaactaagcatgtcccaggctattcgaccttggaacctttttgatgccaactgtctaccgacccattcaacgcatttggggaaatgcctgttatctcctcactgttcttcaaacacaccagcttaactcccacccccggggcctttgtacctgctgcccctccagaacagcccagagtgtttccttcagtatccacagggctcctcctcaccatctcaggtttattctcagatgccgccttccagctccgccttccctggccaccctatttaaaattacactccccagcgttctctgggctgtttcctgctgtttttctctgaagcactacagctcttccttgtttgggtttgtcagccccagtagaatgtaaagaatttttgcctgattcatttactgctctatccctagcacatagtaggtgctcaaaaaatgtttggttgaacgtacgaatgtgtcttagggagagtatggaagtgacaatcacaggctttggtaccacagagaggcagactgagctctaggctttcatattcactgctgtggtccccgtaggcccccttccctctgcaaaatggggtgcctccctcacaaaatcctcggcagcactgaacaaaatgtcacagcagaatctttggcaagtagtatgcccagtgtaagcccttgataaatatcactattatcttcatcaataaaatgcaagcccttcctgctggggggatgagggtgagcagacgccagcctgggtgtaaataagaagtgtgaggttcacacgaggctgacaaggggcagccttgctctcccctgtgttcacagccttgctttggccacacagatactttctgaaaggggggtttggggagaggccagggagactctcctgcccccattctacagatggaaaaatggaacacattcccccgacttctcaaagctgccaactggtccaggatgtgcagtagggccttctgacagcccacccagctcagatctcagccactgctaagattctcttggggcccagaacttttctgggcctgactcccctgggtctacctgccacccctggtcctggctccaacggcctgtgcccttggccggcaccttcagcccacacacccactactataccttgagctgaaagaaatagtcctcgacctgctcctcattcaatttcagcttggcagccaccagctgcttcagggtgtgggccacatcccaggccatgcgcatatcccagcaaacatagaggtggcctggctcctcgtggagtacacggagcaccttgctggccagctgctgctgcaggatgtcctgaacatcgacctgaaaccagaggaagtggtgggttcagtccccagctgctggggacaaggcttgcaggcaggcctgctgtcctcagggaagtggggagagggcactaaggggtgaggagtgagtcccctcccagccaggaccttgcatggggccaggcttaggatgaggcgcacagatgcccctggggctgggctgggattagagagataaatgctggacacagtcctgccctcgaggggctgaccatccagtggggatcccagactgtctctgaatttgccatgcctcaaagaagcatcagtgaagccagtccccctgcccagggctctgtctatactctggaaaaggtagcctctcaatgcagactgtccatcaggtccctgcagggtacggatcccgggcttcgcagttagaaggtccaggagtcagtcggggactctctgctcctgctccacacaggatgcccagtggccccagcactgggcacagagcactggacccgagaggtgccctgatgggacaaatgtgtgaggaccgagagtctgttctgacacctccggctcaggagacaacgcggccctgggggcagcagagcctgtctgagggccgtggtggaagcgttggccgccctccagtcttgctgggcttgacacagccagcctggatcacctctccctgggcagtcgcatgtcccaggggtcctgctggggaccttcagcaggctaagctctgggcttaacccgcgtgtgacctaggttagtcctgaacctctccgggcctgtcgcttatgctgtatgagagggtgtaacgctcttcatagcatcactctgatggttgtgaactacctgcattttagagctcaagagctgaagtctcagggaggcgaggggcccgtggggacccagggctcatactgaagcctgtgtgtgtaatggcttcaccagcttttaggctgcatttaccttagcttgccaggcaggagggaataggcgtgtgcaccgcatgcagcacccgcttccgggtcatctctagcatctcctcccggtaggtggcggtcctcatctgggcggcggcaccagaagaccagggtcctgcggccttccagcactactgccgggagtcccgggctgttgttatcatgttggccaccagagggcgcaacggctccaagcccaactggaattctcacttaactcccacaagtatcctagctagttaatagcattatccccactttacagatgaggaaactgaggcccagggcattcagatcactcatccatagtcacacaactgaaaatgcagatgcgggattccctcagcccatcggagctcaaaagcaaggactttcccattatccccactaccaggagagggagccccggctccggtgccggagacgtgaaggcggccattctaacccacaaaggcccgcacagggaggcaaacttgggagatcttccctccagagaggtccaggaaccgttcgtggggctgcggttctgattctaggcaggcgctgcccctggtgcccctgccacctgggaagcctccagccttacccttccgctgggagtcatggagccgctgctgccagaaactgtggaagggagcgatacctgtgccaggcctgacaaggatgcgaggatgggagggatcctcggggaggtggaagccgctgacacggaagaggacaggagaagagggggccagtcctcagacaccccaggcccacgcacacacaggatggctggggagctgggcctgtggggggtggtcgtgaggagatggagaggacaagaagctcctatttgatttcccatgtcctgcaggctgcttcacttctgtccaggcaccagcacctcccccaggtccttctgaaaaagggccatgctcactggactctgggcccctccagcactgttgtcatcgttgtccctgctagagacaggcacaccagtgtgaccccagtgtcttctttatgggccacggggcccccgagtggcacctaaaccccagatccctccctttcctcccggaacccccaggggtcggcggtcccacaggggacagagtggaaggggtgcttacttccgcacaaagcagggcactgggttttgaggcttcagttgttgagccatgtgctgcagacgccgtggtgcaggggaccctggccatctgctacgataccacaaagtgaccaatgtcccctactgcccatgtgcaaactgtaccagctgctccgcccacaccacggcctccttggacgcccccactcaggcactctcaggactcaatgagcagctgtttgttctggttctgagatccaccctctgtaagcgcggagctgaggaacgttgaaagggacttagagaggttgcaggttgtcccgtctgcccaagcagaaactgagttccggagtggaaaagtgacttggagaaggtcactcaggtcgcggtggaatcaggtggacagctcagcttccctgactcctactccagtgctccttccaaagactttctccgggaacactcccagctcaccactgagctccactgacagcagcatgaagtggcccctcagggtggctactgctgtgcgtgctcatgagcgtggcccttgctggtagcaaccctgggtggtggatgagttccgcgcatttcagcctgctctggcaccttgctttcctcctcagtgggccctcccgggcttgtagaaacccaggaggtttctctgggttctgttccccttacaatggcccagcacttgaaggaggcctccaaccaactgcagaggtccccctggttttcctcgggattaaattttgctctcacaagacatgtaggcctctcctctcctggtctgggtggctgttctctagcagggcaaacagagtctctggccagtttttagaaactgtgtttgtgcttcctagaggacagaggactcagaagtgtgggcagctcccagctttgcccacccaggcaacgctcagttacagagggcagggcagggggcagcggccagtggtggagccgagaccacctggacgagatgttggcctcccgctctatggcagcatcaccccgccccctgccaccccggcccactttgcttccctcagtgaccctgacctttccttcttggcttcagcacaatgagaataatctaattatttctatgcctatctctccactgccgcctctagatgctccctgagggcagggctgatgtctgctgtatttccacacccaccccagtgccaggcatgaggaggtgtgagataaaccatcactgaatgagctgagtaagtgaatgaacaatcaatgcagaatctcccttgtgttcaggctgcacgaccaggaagactaagaaccactggcctcccaccaagcattgggtgctctccacgtctgatctcattaaattgtcccaagagtagtggaacagtggggtggtggaggacttggacttagcagttagactaatcaggtctgaatctctgctctccacttactaacagtgtgactttctgtgccacctgtaaaatgcacacagggcctaccccacaatgtaactgatcatatacatacagaaggcttggtttagtgcctggttcctacagatctctcccacacgcctcctattacggttaacaactctgggtggtgggtgttccctccctccttgaactgatgagggagctgaggctgagttgatgaacagatgcccaataaggggcagactgcggctgttccagatcctcctccctgggctcacctcgggtgtggtacatgagcacggtcacagtcaggtggatctccatgggcatgtgatcccaggaggagctgatggagtagaacctgggattcagaatggggagctgggagagcaggaagctagcagacacccacagggacagaaactcctccagcacctccaggaacgtgaggctgttggtgaacttccacttgctgtactctgagagtaagtggagggtgatgtgagcgactcagggcacctgccccactttgggggaaaaggctttcacaacctagtagtcattcattcattcactcactcactcaacaaacaagtccatgtgccaggcactgtccagggtgctgagactaccgagcttgagaagaaatagttcctgtcctggaggaactcagtccagtacatttatctaacttatgtgacctcctccactgtcggcaactcgtgggcaggggtcaaatttttgttgcaatttaatttggggcaaggctttggaaccaatcagacctgggtttaaatcttggctgggtgtcctcactagctgtggaatctcatcccaattacttaacctttgtgaaacaaggatagtattgcctgccttgtggggatgttatgggaattaaatgagaaagcatgtgccaagttagtacattgcagccacaaaataatggtggtggaggtagttggaatcgagataattagctataatgatgacaataataatgacaaccagtgccttttgcagacttggaaccagacagttgcaggtgagctaatgcattctctcattaacttattaattcagctctccatctgtcactctgcccattatgcccatttatccattcatccacaccatccatcccccaatacatcttaagtgacaagtttattccagttttggggaaagcaaagacggataagggcggctcccctttctagctaatgttcaaggcagtgcactctggttgcatcctgcagacacttggaaaaattcagttcactcaacacaactgtgtcctagacatgggccagcggacgatgcctggcttcccaccagcctttgacaagtctcactttgggaacctggtgtggatccctcttgaaagttaaaaccagctctggactctggctccccacatgctgggaccccccacatacccccactgcccaccagccctgatcttcacctggcacagggcctccagcctcgtctctcaggcttttctgtggccacctgggccagcttttggagcagcagctgggtgggggtgtggtgatgtccaggaagtaggtgagggcctggctgagtgagcaggggggcagcctcttgtcactgacccagtagctgcctggatggggaaggaaggtgtcaggatggaaaagaggccccattcaggattctcagtaggtagcgaggcccccaggcagacaccctctattctccagctgcaggggaaaggaggctctaaagacctggctctaagagcaaaaggcaggaagaaggtggcgcatggagaaaggactgccagggaaggctgatcaccagcccccaaaggggcagtaagttggcgtggtcctgataaactaaccacgtccttttctggcccagacctgaactttagcaagacactcaccggtgatctacagactcacaatgactaaatccaccaaagactaatggatacctcacaggccagttgttcacttggagaaaagcccatgactgcagtcccttgggtgctgtaccaagaggtgctgggtgagcagaagatgagctcaaagggaactcccagggggcagcatgcagggcagtcacagcacagaccctggggctggaagacatgggttcaaaccctggctctccacttccgaggtgactaaagcctctgggccttgggttccctccctgtgaaacagatctgatagcacaacctatcttgctgggttggcatgagcgctgaatgaaattgcgcacatatagttggtgctgtggccaggtgtggtggctcacacctgtaatcctagcactttgggaggctgaggcgggtggatcacgaggtcaggcattcaagaccagcctggctaacataggaaaccctgtctctactaataatacaaaaattagctgggcgtggtagtgggcacctgtaatcccagctacttgggaggctgaggcaggagaatcacttgaatctgggaggcagaggttgcagtgagccgagatcatgtcactgcactgcagcctgggcgacagtgtaagactgtgtcaaaaaaaaaaagttggtgctgtgcctggtaaacatgttccctaaatattaggtaaaaatatgagtatgacgttatttcctctgaccagggtcctgatgaaccacatccatcaccctgcagtcacaaggacatgtgtctcctcgtcctcactttctcctagatggtggcggacactgccaggctctgcctctctgatcccacttttttttttttttttttgagatggagtctttgtcacccaggctggagtgcagtggagcaatctcagctcattgcaacctcctctccccggcttcaagcgattctcgtgcctcagcctcccgaggggctgggattacaggtgtgcaccaccatgcccaactaatttattttgtatttttagtaaagatggggtttcaccatgttggccaggctggtcttgaattcttgacctcaaatgatccacccgttttggcttcccaaaatactgggaatacaggcgtgaaccaccacgctcagctgatcccactttctgactttggccactgcattgagggggatacactggtggtgtcattatcactggggaaactaaggccagggagccatgcctgtggctgggactgtttccacagctgctttcacataagattttggcagcccaccctctcagcaggaaggacagggatgactgtcactggcaggcccaggctcagcccctcagccagatggggtggccagaggatgccaggcagcactggctccctggcccagggctcactgctctcatccagagcctccaggtgccctgtctggtggggtgtggggccatccaccactcgctccagcatgccttggaccagggccagctggttgcctgggcaaaccccaaggtgctcccttggcaggtagttcaggccttggccctcctcacaagagaattccaccaggatggtggtgtggctgggtaaggaaatagaagcctcaggtgggccgggcgccatggctcatgcctgtaatcctagcactttgggaggccaaggtgggtggatcacctgaggtcaggagttcaaaaccagactggccaacatggtgaaagcccttctctactaaaaatacaaaaattagctgggcgtggtggcaggcacctctaatcccagctactcgggaggctgaggcaggagaatggcttaagcccgggaggcagaggttgcagtaagccgagatcacgccactgcactccagcctaggcaactgagtgagactccatctcaaaaaataaaaataaaaaaagaagcctcaggtgatgttgcaggatttcctccaaggatccctgatgggcaagagagattccccaggaaatgcactctcctttcacttacctggctggttccacaagcctgggctgccaccctgagcttgggaagcatccccacagccaggggtgcttgagagggccctgggagcttccctctggggaggagaggggctcaccccttcccagcagccctctgagccccccgagcacttggccacagcctctgcctggagaaagcatccctcttggagataatggacatcagaagaaacctttccttgtcaccaggacaaatgctgttcttattagaaccaaggccaattttcttaatgcatgtggggaggacagcacagatcaatgaaacctgcagataatccacaaggcttatttcccagagctgggaaatttccttccctgccaacacttttcctgaaagttcttaagaatgagtcaaacagtttaagtctctcttgcactctccttttagtgaaagagttcaatgaggaaggagaggaagtggaacagacgcttagagtccaagctggaaaagtggcccgtggttaaccaagagtagatgtaaaagcacaggtggccacaggttaccaggtgagccagtcctaccgatggcatggctgctaatgccagcagatgctcctctcctctcccttcaaagactgacttcttctggtctttcattcattaaaataaaatcagtagagcatcacccgagaagccctgcactttcccttacctggatgttggactctgtagcttctgctgagatttgagcctcgtggtgaacatgttattggcgtgcatgctgctgagggctgtggaggacacagagacggtgaaacggcaaagtggctcttgagcgtgggtggcagaagcccccacatgtctgagtcagtgacaccagagcactacccttggggcatcctcctgaggtggctgttggggttttctttcctttccttttattccactgtttctgaatcacaaataaaggtccttggtctgatacagggcagctgggttgcttctaggtgttgggaaattcaatttaggaacctaaaatggaaagtcccaggacatctccacagcttgggatccacaggagagcatcgttgacattggggatatcttaaacatgtagaaaccttcaggactatctaatcagggcacagggcacagcacctgggggtgcagagtggagagttcaccactacagcctggaatcgcctctgtgatgccttcttcatgaccctttgctgcctttgtggctagaaggctggcgctcagatcccaaagtggccacaggctagcagcttgcttcacctccctgaactgcaatttctccatctgtgcctttctcccaggaggagtgtccagattcacttagcccatgtgggccaggagccctggacagtgcctggcacacagtaggccctcggcggatgctgtccccttctctctccaccatccttctgcggctccctcctgaaacagcctccctcagcgccttgagtcttgtgccctaacaggctcttgcatgcagtgagagggaggccccgaggccagctgtctctgttcagaaggacctggggttctccttgaccatgagctcagggctcagaccccaacacaaacaagccccatgtgctacagagaagcaggtcccttagctgaggtccaaaggctgtgagtcctgcacgagcctgaagtggtgcaagccccaggtcacattggaggtgtagagcttggggatctgaatgtgctgttggcttcggacatcaaacgtttcacaggctgcctggaagaaggtggagcagatgggggttaatggtcagcagcagcagcagcatccccaccactggggctaccactttttaggcccttaccatgggccagatactaagccatctgcttcgtgtaacttcgaagcacacttacctgatagggtgacagcaaggactcaaagaggtgtctgggcttggcacatagtagctattgctactattttgaatgttgttttgcctttgtttttgttttgagatagggtatcgctctgtcacccaggctggagtacagtggtgtcatcatagctcactgaagcctcagcctccctgggtttaagcaatcctcccacctcagcctcccaagtagctgagactacagatgtgcaccactaagcctagccaattttttgtattttcagaagagactggttttgccatgttgcccaggctggtttcaaattctggggctcacgccatctgcccacctcagcctcccaaattgctgggattacaggcatgcgccacagtgtctggccattatgaatgccaatattgacatgatcttcttgtatcctcatgaccacactggaagaggtctgattgttcccttttcctgttgtggaaccacatggaggaggcctgggctttggaaccaagcctgccccgatgcaagctgatgctcctaagcaccactgctgagtgacgctctgcatgagtgatgagttccctaaatgactggggccaaccatagcagtaaagagctatggagatactgagtggatccaaagtggatctgccactgtgtggtgcctgtccctaggctctctatggctgtgagactgaaacagacacagtagttaaaaggtgacctaggtagtcagtgggggagaccttaaactagaagctccctaagggcaggggggtatctgtgccaccttctcccccagagttgtgtgcacaaggtggagctcttctaagggcctgagggagagcagcagtgacctaagccctcaggcctgtggccctggctcatgcctgggaccacatctacaggaccaggggcagaggtcatggcacctgggacacccagcacagatgtcctaggttgaatgcaccctgtcatgtccctgctgtggagcagctctggctgggaaccgaccttgaaggtttgcatggcccagctgcggaaggcatcctctgcccactgacctcatcctcttcccccatcggggtgagctgagaggcccccaggtgggacagctactgggtgaggtcatgagcaaaggcacagaactgagggtacttgctggagctgaggccaaacatggcatacctgcccaaggaaacacacagagactcatgtcccatgcaagcaacacctggcacccagcacccagcaccaacagcctggagggccagccacagactctccccatccagctggagcatggagctgcagccccttctagtcctcccaacccctgagccttgtcaccaactcccatgaccaccccatgcttggcctgcagacccgtgagagggacttggtttctgtggcttgacccgtgacacactccgagggcaaacctctggcccagggtccctctgtgcctggtcagctctgagaagaccccgtatgcgcacccagttccatcccctgagccagactttgggtcctcagggcaaggttagaagttgcaggaggagggaaaaagctttacctgaatttgttggtgagctctttcagcatgaagagggatttcttcagtttctagaaagagaggaaatgacagagttctcaggccaagatgaaaaaaaacaccgctttttccattcctctggaaaactggccacagatggcaggagatggctcctggcccacaatggaagttggtttacatatggggccacctggccaaggacctggttgtcaggtgagaattttagcttgtctctcactccagctaaactgtagcaacttgtgtgggccctgtcccctggtgggagacccagaatagcctggccccctcccatccagccctgggcatctccagagggcctcctaataggccgtgattctgtcttcttgtttggaacctggtaaaagcaacaacagttggtcctacagtctctgaaataaggctggctttccaggaagccaagatgattccaggaggtatgtgacccagcagaactagcgtcaaatcccatggtgagtatttactcccttttccataatttattttttagttattccccttcaattacattttcattcttttgagccctggagagacagtcttgagttggtgctaatagacctttaatgcctctctcattgcctagtactcttttaaaaaacaaagaaggagcaggccttggccagggaatagtatctagctaaaattcattaacttcattttgttttcattgaatttaagttttgctgctttccatttgtgagagtgacacaagtttcctttaaacatgaatttgtaaatacaaacaggtaggccattcacagaaatatattaaatatgtcataggaaagggggcactcccatatggcaataattacaatggaggccggcaaatgacctgagtgacccagatggcctgagcactgactcccaaatgccctctgtaggacctgcttcattccccggaccctttcctgggtcctcccacaccctacaacctcctagaccagccagacctcaggccacccacctctccattgctggggaagtctccattcccaaatgtggtggtctccaccagcaacagctgtgcctccctgtacttgtccatgcagagaacctggatggtacccaggtggacatcagccctcagctcccagtagatgctctgggctccctcccacacctcccccaggccagggcttctgtgctcatctgtctcttccagtgcccggcacaggtgtggcacggaggaggtgagtgaacagatttgaacacattgtcctcggttctccttccttgctcaagccctgaagctaacccgtcaggaagccctggatgctctgcctgtaaaatactgcctatcctatgtccaagctcctctcagcacatccattgctatttacagttttgtgtgtgtggaaatatttccacgaaattggaatgagcaggtcacagctgtgcctggagggaatggctggggaaatgtgccctcgccttgctgttctatccaggcccacccagctgaggatgggggacctgccaccactctcctggcagttccggagtcctgggagctggcaggtgaggacccaagagtgttttcagcaacctggctgacctggtcatccgtcagtcccaccttagcctaggcctctacacagcacagatcacagctcatcccattgtggcattacactggcctgtgccctgtcctcagggtcacatccgtctcccagaagccatgtgaccctgaccctggaaaacccatcaacctgtctaacagtcaggttcctcctctgtgcattaacaatggcattgacgcctgctttgcagggcgctgggaggggagagggaggtgtatgctggaaagctccccaagggcaaggcctgcctctgcgtcactcactgtcagatcctcatagcccggggctggtccagcacgtggccaccattccctaagtattggatttgcttcatcagtgctgaaggcaggggatagagcttagacagaccccctgtgttctgtcttctttatctgcagcttactcattcttgcccctttcacatgcaccctgtagagcagacgttcactgagtttgaacaaaattcagctagagcagctgatgtatattgaggcctgagttcacctgcctgggtctctggagtcctcggagtctccgtgtggtccccgtgatctgacactgaggacacacctgtagtctgctgatcccagaaagaggggtgtgtgctgcctggggtggggaagatgtcggggcatggcaggtggctcctgggactgccccccagggttcagagaggctgaaggcttcctgccacacaaccttatccagggctgttgggcctgggatatggccccctgtcagaactcaggtaggagcggccttggctgttacccagcccccttgccacctcacatggggacctgtctccgcagtgggcgactgggcccagatatgagtcaccctctgccctcctgggctgctcagtccatgccaggactgaccattcccacacctggctgaactcttggctctggctctgggcccggggtcctgcctgtgccctctccttgaatgctctgggggtcaggaacacccaattcccttgtctccctggctcaaggcttgttgtcctggcacccttagaggggtctgcaggagtgaggggcctctgctgctctctgaggctgtgggtgctctcagggaggggtgggggctcccacaaatgggtctggctcctccagtgcgcttgagggccctgtgagggggagagcgggccaccaaggaaagtgggagggggcttgtgggaggctcttgcccacatccccctcctgcacagcatgtcccgtacacacgcattgagcgcctgccctgaggaccgatgggcctcctgtactttcttagagtccaggaagaagaggagaaagaaaaggtgaagaggaagacccaggtagtaggattgggggtcctgagcactcccccactattgactgccccagaaggtgattcaggaggggacctggtactggagcccacctgggggtggcaggtccccatgcttccttgttagtttcttcatagaggcccgaaggtgtttcagaacaggatcattgtccatggctcaggtatgaaataactggtctcgaaaaggtgcccacaggccagacctggacgtcttcatgaggcgctgtagggacagggtgggcatcaggcccggagagttccctgggagaggtcagagcccacaccccatggccacttcagtctcccactgggtggtgctggatactttcatggccactccaggggtccagatatgcacagaaggctgtggctggggggtagcctgggcaaaaaaagtgctcactacactcctgactttcatctgggtcatgtgggggatggacttggtgtcattgtgccctgcccagcccacctggacagacctccttctgggccagaacagaggatcatgagaacagtgtgaggaagctgcccttgggccagtcagggtctgaccccagtgctccccaggccccactggccacacgtggacttactcctctgaaccttaaaggcaatgcttgttatcggcatcaatgcctgttccccttccagcaaatacatgtcccacaggtgcagggtgagcccaagagagatctgtggggacagcaggcatgggaggacctggcccttccaggctggggttggtggctcgagctgcacccattggggcttcagtctccagagtcagtgaccttccccatgagggtcacctgacccctccaggacactgggtcagaccaggtcttgccgctcctcatgggggggcactcatttcagtggggacgtggcttctggagataggggcttgcccgcggcttgaggcatccctgagccctcccaagttgggtcctggcccagtctgcccatgaggctgggcctgaaccccagcctctgccctgggatgacccctcttgggcagagggtcttgcttgtgtggcctgcagggaccctcctgggcctcctgtaggctaggggtgagcctaacccctgggctggggatgcagggcactgcagggcaaggagggttctaaaccgatgtgcagaatctcctggccactgctccagcccctcctggagtgactccttcatcctccaagtctccagggtggcccctatgcagccagcctctccctgatccgtcagcatctggccacccagaccagttctcggtccctatggtttggccttttccagaatggtctaggaatgggaatcctactgtggtagcttattgggcctggcttctttcccttagcaaaacgcatctaggatccacccatgttcatgtgggcatcactagatcgttcccttttctctctgaatcttctgccatttgaagggaggaccacccttcctctctgcgttcccgtgttgaaggtcattcccgtagcctccatgtgtgagtgtcaatgaatcaagcagtgaatgtggcatgcaggtttcatgtggacatcagttttcaaatcagtgggttcaatatcggtgacactttggggacatgtggttcaagtccattgaactttgtgagccactgcacaactggctgccaaagtggctgtgccgtgtgatgttcccagcagacctggatgagagtttccaggaccccaagctccccctgcttttggtcctgtcagtgttgcctggggaagctcatgggccctccatcctgctgccctcccgtgggtcctaccatgggtccctgtgggtcagggagagcacttttcaccattgtgcatgattttctttgccgccgtctgtctcctcaggatcctcctgggttctggccccacgtgttccagtctggcccagggcttggaacttgggaggtgctcggtccatggtaccagctgctccctggtacaggagagctcttggcagctctgtcatccctcctgggtgatcctggcttctgctccagggaagtccccatccctctggttcaccccatctccactgggaccctgtggctcccataggcttacttgactccatatcggtccctgaagaacaggtggttccttaatgtccggctcatgtccaggtcgatctggtggatgtgtccagaggacctcttgcccttctccttcatgacctgtagggcagggccaagaggaggaagcaggctcagaatagatggaagactctctgccccaaatggcagtcagcccacagtcagcccttctggaaggaaggaaagaagaaagatttccttctgcagaaagctgctttttggcttgtttctgaagccagggagggtcacgagagccgagttcgtctgtggtgactatgtcaccatctgtgcccaggatgtgcatctgaccaccccccaacccccaaagcctgggcttgatgttccctccagctggagacctggctccctgacacggcctggcctgtttgttgtgtctggctgagcgtgcctggtattttctgggattttttgccttgctttcctgaatgttcagggggcctgaccacagttggccctggacattaatgggaatgcctttatacactcactcaatcagctgtgggcagaaaacaatctggtgtcacatgccacaggacaaccccagtgaggaccagagcccgaggattctggaaatctttggttttggccccatgattcctcagtagaggtgaggtcaagctggcacagggtctcccttcccaggattgaaagagtgtgtgggcactcagagtcctgaactctgatctggaccttttcctcctttcgggtcaccaggaggcatccctactccgagctccaggggtctccatctctggattcagattccctccaagcaaggtgatgcttgcacgaatgggcagcaaagctggcaaccaggcctgtggtcctctgggtgaggacagtgtgccattcgtcctctgagaggacacagccatgggtgcctgtcccctgtctctgcagagagtggttcctggggcctctccctccacacattacttttttgctgttctgatatgtctcccattctcccagcatttccatccacttgctctttcatctcatctcctgccacatttgctgtcaaatgagaaatgttggagttagcggagctgccaggcttcccggagtggcccgtggatgctgggtcttgggctctgaagccttggtgggacccaggtggaaggagccagggaagggcagaccctaagggctgagggcctttgagcaaatgagcactagtgggctggccttgggaccccgggacgtgccatcctcaggccacagacacaccagtcgtaggtcaggtcccagcctctagatggggtcctaacacaagtgggcagccacccccataccatgactgtggttctcactttggaatttcatcaaactgccagagatacaacaacctggggtcaggtccagcaggaatagctgcccctcccagtgacagcgtgttgccctcacctgccactgcacagacctgctgcctcctctgcctcatcaaccacccactgagtcccccatcccgggaccagcccccgatggatcaggctcttaccttcaccttccaggtagtgacagggggcagctccgtctcactgtaagggaacccaggcagagctgaggacttgcacagggtctggagtcgtccggttcagggagtcaacccccagaaaggactggctctgtcccatccagctcagggctcatcccgggagaaggcacagggaagggaggacaagggccttcctgtggggctgactcccaggagggtccaggacctgggagaagagggagtacagagccagcctggccggggttactggggcccctggtgtggggggtggtcaggctgcacaatgggtctgcccctcctggactggaggtggtgctttctgctggagctgagaaaggtcagcctttggatgggatgcgggccacccagtgtgggtgaccaggccctgacagtaatccctcaaggagtgaccagtctagggagcctggtctgagacctgcctggtacaccctgggtgcaccaggggcccatcccacttgagagtcccaaggcccttacagcatctgacctcccagggtccacctgcctctccctgcacccaagccacacactgcatttcagaagtggcatggctcataagctccctaccacactacttacccggtgatcctccatctctccatcctatgatccctgagggatgggctccgggctgggctcctcttacctggccccagatcccttcccagcaccagacccagagtcattagccacaagctctgctgcctccctggctctctgtgagatgcccagaatagggccctgccagtcttctcccccattctcctagggccacagcccctactgtccccatgcctttcccccttccccatggggacagtgagggctgtagctctagggaaatgggggtgaacaggggaaggtgggccctcagagacctgctggacaacagccccgaggctggatcaggcctcccctcaccctgtggccacaacgcttggatctcactggggttgtctccaagtgaacagggccagaccctcaggctgccttcctcctcttgtgctaactcggagacagaactgctgagagcccaggggcctgacctagccccctctccattcccacccgctccctagatgggccccacaccactggcctaacagcaacctcaggctggaccggcaggggagccaggaaggagttctgaccctggaaaggaggttggctcgacctagggagacaagtcctgcctcagaaaggcctttgtaaaagcaaacccagccctgagctgagataggtgctttaggggctgaggggagcacagaggactcactgcagaatcccaaagcaatcagcactgctgtagattccaacaggcacaggccccatgtctgctggcagcccagcttggtgtccctgcaacccagtgggagccttggtgaggggtccaaggtaaagggtgaaagggccacctgtccccgctctgtgctcctagggagcccaggaccctttcaccagggtgcactggaggaggcctccctccagggagcagactgccctctaccttctcatgcttcataatgatgtcccctcactcctgcaaagtatccgcatcctctaccatgtccatcctgtgagacaaaattgtctaaaggttacactgtacccgagagcttcggagaacacctgaactgctcctgcccggttcccagatgctgcctggctgcataaccccccttccaccactgcacccaggtgaaaaagggccagccccagtggcccacacctgcacaggtctctggggtctaaagcctcaagcaggggtaggcatcttcccaaggacttgagaacagtgggacctggacagagaatcccattgtccccagatgccatgaaacgcgcacacatttggcctagcaggttcaatggtgtccatctgccaagggtgaagggcccatgatgggctattccagggatgtggaggcagactggggagagggaccagaggtctctgtacaataggcctcctgggatgctcagggaccacagagatgttcagcttcctatggggaacaagacctctcctgaccgcttggttctactccactcatcacttggactatcatggcccttcagtctgaacagtgaagccactttaggaacaacaccagttgagcaggagggtgtttggttttggggatgaaaataatctactgtctccaaagcagcccctgtgctcatggaaaccacatctctcagggagggactgtggactccaccattctgagctgtccatacaggaaggggattcattttcctgggtcactgaggaagaacagtgggtctttggtcctggagaacacctagatggactgtcccttctgggaacacttggggcaaaaggagggcaaggccttgagaggatcagacagagaaagaaatacttggggagaaccccagttcctggacccctttgaacaggatggaagatagtctcactccagccagctctccagggctccttcattttccacagctgcccaaaggcagaaggctccccatgctactcccagacaaggggccatgtgtgtccagtgggtcccacagggaccatcaagacccagcttagggcacagatgtgttcggagggccctcccctccaccccacccacagtggatccatcccagtggctctgccagggccaggctctgccccatcgggatcggaaaccctggacaaatttgggatctagggcaaggaggccaccgggttcaagccttaagtccagtgcagcacagggcagggctgagagcaaaacccagggtcatgcctggattcctgggctggttactgcctctctgaccccagatgtctcaactgccaaatgggtacattcaggagccaccatgaggacaaaagagacaattgtctacatgggcagtgtagagtgggtacctggtgagtgctcaggggtcaccttcctcggctgctgcctagaagccagcaccgcccacactgtagccacagtccccaagtcagcatggagggaagagagcaggtcacactcacctgatactgatgaatcagctggcctgggctctgcctctcagggagaaaacctttgagtccacagagctgctcacagataccactgtgtgtgtgtagctgctgtagaacacagaggcaggccggacaacggacgggtaataagcaccagtgacattctgaggtcatggcaggcatcacaatggggccttgcctgggtcagcagggcccagagtcagcatcctccactgcctgaggcgtcaacatgcctgcctgcaatgtgtttgcacatgtgcatgcacacgtgtatgtgggtaaacacatctgtgcatgcatgtgttgcttctctggccaggcctggctgccccactcatgtgtgcacccagttccttgtcactgtcacccccggagccccaggccagcatcaaagcatccatgggtgctccctgacctcagccctccctgcccagggtaggcctgggatacacatagggatggagggaagtgactgctgttgttgaatctcagaagaaaaatgctaatactattacctaatgatccttttagtatctctaatggtctttttagtatctctaatggtatctatttttttatttctgatattttaattgggtatttctctccatgatccttggttattccagctagaggatcctgtggggaaagtgcccggcacacagtagaggctcactcttctagacatgttatctaaaatctggcttatccgtccttccacccaaggcctaggtgatgccaaattccaggagccagaaagagcttgggataaaaaagaacattcaaggggagggctttggcctgggctgagtcttcttgtgccatccaaacctggaggctcaagtcctgaaacagggtgtcctgatgccccaatgcagtgccctcctgattgacacctgctcccctgtactcattagcaacctcacccaccctactctcaaagcacacttggccctcatatctgggagttctgcatctgtggattcagccaacagcagatggaaaatattcagaaatgaaattggatggctgtctatactgaacatgtgtagactgttcctgtcatcattccctaaacaatacagtatcacaaccatttatatagcagctgcattgtattatgtatcataactaatctagagatggtctaatgtatacaagaggatgtgcataggttatatgtaaatactaagccatgttatatcagagacttgagcatccatgggttttggcatccccggggaccctagaaataatcctccatggataccaagggatgactgtataaactcactcaggaaggcttctcatcagaggaagggcctagttcaggacacacagggacatcctccctggactactgtccattcatccatccattcatccattcttcccccagcaactctaggactgtcccagtgacaaccctagcaagtggggacaagaaaaaagaccagctcacgttgtccagctttgagttttggaagaagttgcactagtacgaggatgggggtcagattcctccaggatccagagagcatatcaggcagcctcggggtgaggaaaggagcccagcctctccagcagccacacaggcctgcagtaggatggtgctggggctggccctgtggatcacttgggcctagtgaggggaaataaagaccagggggcagaggaggagcatgggggcagctggtggcctaaggagaaggcatctcagggaaggggtctgtattagtttgctttcacattcctataaagaaatacctgagactgggtaatttataaaggaaagaggcttaattgatttgcagttcaggaaacttacaatcatggcagaaggcgaaggggaagcaggcaccttcttcacaaggcgacaggagggagtgagtggagaacaaggaagtgccacactttaaaaccatcagctctcctgagaactcactcactatcaggggaacagcacggcgtggggggaagaactgtccccaaatccaatcccctcccaccaggttcctcccttgacactggaggattacaatttaagatgagatttgagtggggacacagagccaaacctatcagggtctcagctggtcttgcagctcccctggggctgagaatgtgtgcagatctgctgaccctgctttatagcactcgggggctctatcagtgcacccccatctgctgcttcctgggggtggtggctgcttcctcaagaggagagtggatctgctctcttgccagccccctgcagggccttgtggagctctggccatgtcctcccagggtaagggcaggaaacctggctccttgcccttcttactccttgggtgacaagcctggggtcatccttaggccccatcactgcccctgcttctaaatgaagagcattttgccaaatcttcctgggagaggctgggggctcatccctgctgtctgtttcatcttgttaaagccaggttaagacagctgagcaaacagacagtagagtggcccccaggaagggtgggtggaggatgctggcctttgggcttgcctggaccatggtgggagggggaaggttaccaggaagcagtgctgtcagggttaaattcaggaggaggtggttatgctggtgggggtggtgtgtggctggtttggggtagggcataagtaagagccaaggttggtcagcacccagagggggcagctgactcatccctgtggcagcagaacccagtggttgcccttagttcctggatccagggagacttctggggcctgggtctggggcagcctaggggtggaggtggtgggagaggggtgggagaggaagatttgcctggccgggtgcagggcaggaagcagcccagggactggtttgcagtggctgctgtcatccctacccccacccccaaattcacccctactcccaccctggtgtaggccagggccttttcaggtgtcctctgctgtggtctcagcagatcacaggatggaagctggcagcctggcaggtgcaccacttgagccaggggtgacctgcagcttctgcttcttagagtgcaaggtcccacacgcctgtctttgagggtgctgggaggtgggggaccagcttctgtagccctgtgcatgtgccctgaaaggtggcctaagactcctgtgtgtgcctgtccaggtggggccccaggagcctgaacagtggcagggagggagatgaggagggagagagaagtggagatgaaagacagagagagagagaagggagtgagagcgagaggaagagagatggggagagagacagaggaggctgagaagaagagaagggagagagagagagtgatgtaaaaggtaaagagacagggagagaggtgcatgagtaggaggttgggtcactcttgatcccagttgccagtgaaaactgttggtcactgtcacctaaccacacatgcaataaagtcttctgcctgctccttacagcccccaagaacaccttcttcaagagaataaagtctttgatggctgcccttccctagttgattttggtcatgtcttctaatgaaccatgatgtctctttgtaggaatggtatggaaaaagagccagatttgaggaggaacataacatgaggctttccaaattattctcagctgaaaggtctttaatgaaagtttcaaactctttagtagatggatcgctggcatcagtggtgctggtgctagctgcctttcttttctctcattcattgtttgaaattgttgaggattgaacaagtgtgaagatgacctgaataggccttcacttttgacagtcacattcttggtaactggattatacctatgataaaggagacagatcagaaccacactcctgcagctggagtacccaaaccctgggaaggcaggtgtgcagagaacgtgagaatccttgggataaatgtggtgcagcttcctaaagaaacagagttttaatttcgagtaatttattatttttaatatgttaattaatgaagaacagacacaggtatactacaaaatatgtatgggttttttataataatgtttttttttgagatggagtctttatttcccaggctggagtgtagtgacctgatctcagctccctgccacctctgcctcttggcagattcaagctattcttcttcctcagcatcctgagtatgtgggattaaatgtgcccaccaccatgcccagataatttttgtatttttagaggagacagggtttcaccatctggccaggctggtgtcaaactcctgacccaaatgatctgtccacctcggcctcccaaagtgctgggattacaggcatgagctactacacccagcttgggtttttaagattaaatatatgacttcagccaggcgtggtggctcacgcctgtaatcccaacactttgggaggccgaggcgggcctcccaacactttgggagattaagaccatcctgcccaacatggtgaaaccctgtctctactaaaatccaaaaaattagccaggcgtgctggtgcgcacctgtagtccaaactactcaggaggctgaggcaggggaattgcttgaacctgggaggcagagattgcagttagctgagatcgtgccactgcactccagccttagtgacagagcgagactccatctcaaaaaaaaaaaaaaaaaaaagaagattaaatatatgacttcaaaggaaagttagtgcttatcgtggacacactctcatgtctcctggaaattgaattcacttgtcctccatctgggtatacgggtggacaatttggagaggtgctaaattaggatattctctgccaaacacatctttctcaccagtttctcagatcccctgctgctgtagtttatccaatactctgccaaaatggaataatcacagaaaagtcctcattactcattagtgtgaggttctaaccccatccatttatgcaccactagatatctgaaaaccaaaaaaaaaaaggcaacaataaaatgttttcatttatttacccttacttcaatgggtattcagactaactattcagaaataggttagctatggccagatgcagaggctcatgcctgtaatcctagcactttgggagtcggagtttggtgaattgcctgagctcaggggtttgagaccagcctgggcaacatagcaaaaaccccatctccactaaaaatacaaaaaatttgtattggtggagcaggcctgtggtcccagctactcaggaggctgaggcaggacctcctgaggcaggagagtcagaggtttcagtgaatcgagatcatgccactgcactccagtctgggtgacagagcaagatcctgtctccaaaaaaaaaaaaaaaagaaagaaagaaagaacttaactagtagggggaatatcctgtggtaacatctatacttaccaaagataaaaaagaaaatgacaagaaaaattctgtctctactaaaaatataaaaattaggtgcacatgctggcacacacctgtaatcccagctacctgagaggctgagtcaccagaatcccttaaacctagaaggttgaggttgcagtgagctgagattgtgccaatgcactccagcctgggcgacagagaaaggttctgtctcaacaacaacaaaaattactaccatgtcaaataaattgcatagattgcattgctttgggcttgcctttctttagcaagtaaagagaatgagaaatgttctttctatgcatttcctatgctctttgtgcttcatgaactaatacttctgttactcctttagaggaaaaacatcttgaaaacatttcctaagaaatactaccacaaactggaactggctttgtagaattacttcagcctaactctctttttaaataagaaatctaagaccatgaggatcaggatttgatgtgtattctaaagcgtcttgtttgacgcctaggttggaagcatgtcactatgagtcaactaagcaataactagaatattatttattccagaaagctttctcttattttaactgtgtatttgcagaacctcaaggtctatgaatcattatccacctataaaatgaattaaatttaactaaatgctagtattgtgaagaattagtttttcaccatttctgtttactcttatactgtcctgataaacatatgaatataatgagtatgggataaccagcagtagagatttctctcgcctttattcattcattcgacaaacatttaatgagcatctactaagtgccaggtgctgtactaggtgttaggcatatatgtgtgaataagacagaggcagctttttctcccctcatggagcttcaattctattggcctactgttctttctcatatatttgggaagggaagatttatattagtagtctacggagcatctgtttaatatttttcatttgccacacccaggcactgtcacagggcaggacaaagtcttcagtaagattggagatcatagtcattgcccaggcatttatctgtgtctagtataactcaggtctgtattgagctgctcatatgctaatacatactacctgatgaaggttagtggtgtttcagaaaaggcaaaagaaacggtctggacaggcaggttcagaatttgaaactgtcaaacaaatttcacttgtaaaaagagatttctgactattcagatttgaaaaggcaatttaacacaattttacaaaccaaaaagatgattgcatattataagtggaaatgtagaagatccataccaaagcatgtaggacatggctgtatatgttggatttaaagccagttcctgagtattcaatagcttgttatccaatctatagatttttttttttgagggagtctcactctgttgcccaggctggagtgcagtggtgtgatctcggctcactacaacctccacctcccggggttcaagcgattcttctgcctcagcctcctgagtagctgggactacaggcacagaccaccatgactggctaatttttgtatttttagtagagatggggtttcaccatcttggccatgctggtctcgaactcctgaccttgtgattcgcccgcctcagcctcccagtgtgctgggattacaggcatgagccagagtgcccagccaatctgtggatcatttaaaactcaattttatttcctattggtaagagtcaaggaaagaagagagaacttcattttgaagatgaaggaaccgtaattccttaggggtaaaaatttaaaaggttgtttctcgcagaccctataacataatccataattccttttatggctcctattaattacctcattattttaagtatgttttaaaggactgtatttgactaatgggttccctttaactgaacttgtttttatttctgatctaacaccccttttaaatggatcaagccaagacagaatgtttgtgacaacggtgcttgagattgaacaacttttggcaagggtaggtgttttaaaggactctatttgagtaatgggtttcctttaactgaactttttagttctgatctaacaccccttttaaatggatctgccaagacagaatgtttttgacaatggtgattgatactgaacagcttttggcaagcgtaagtgctttctgctaaatggctattttgcaaataactgtgtacttcttagataggatcctggattatattaagacagacatgtttaattaaattagccattccattcaagatatgtacctccccaggccacctgaattttgatgacagccattctcaggtcatgtggtgttattttggtctttatggattatgtggataaaatgctgaattcttacttgccctctttttttttgaggtggagtcttgctctctgtcaccctagctggagtgcagtggcacgatctcagctcactgcaacctctgcctcccaggttcaaatgattttcctgcctcagcctcccaagcagctgagattacaggcacctgccaccatgcccagcttattattgtatttgtagtagagacgggatttcaccatattggccaggctggtcttgcactcctgacctcaggtgatcagctcacctcagcctcccaattacttgctatcttgtttgttttctgttttgttttgttttgctgtcaaccaaaagggcatataggcagaaaatttgcttttagctgtttatatagcactttgtaaaatattttcattgtttttttccctttctagcttatgaggtaaataataaaatggcagaatatatcaacagtgcaggtgtcccctccttgaatatggccctgatgcatacattatagatgtagagacatattgcaggtaatatattgggctcgagactttttcgttatcacaggagtttttgtttcattttgttttttaatccctgcataggatatgtgcacatgtatttaaaaggtcaaagagaaaaatctgagaaaataaatgccatgctgtagagacttgttttacttttttattttttatttttatttttggtcagcattataaaattctgaaaatatctaatagctcattccttttcctggtgaagttgagtaatattcatcactgggtatatatacttccactctgggagacctagctaactagctgtaacagtgaactagccaatggtcatgtatagacaataacatggtgggttagagcgtactttcatccagctttgaagataatatggagggggaatgatttactacacttagtatattgtttgagaaaacattaaatgtgtatgcaccaataaaactaaataaactcttaaagatttatatggagggcgtgttaaaaatatagtagtacaggctgggcggggtggctcacacctgaaatcccagcactttgggaggctgaggcacacgggtcacgaggtcaggagatcgagaccatcctggctaacacggtgaaaccccgtctctactaaaaatacaaaaaaactagccgggcatggtggtgggcacctgtagtcccagctactcaggaggctgaggcaggagaatggcatctacccagggaggcagagcttgcagtgagctcagattgtgccattgcactccagcctggccgacaaagcgagactctgtccctacatatagtagtacaaataggaaagcaatttttgtgtatgtgtgatagggtctcactctgtcacccaggctggagtgcagtagtgcaatcacagctcactgcagcttcaacctcccaagctcaagcaatcctcctacctcagagtcctgagcagctgggaccacaagaacatgccaccacaagtggctaactttttaaaagttttttgcagacacagggctttgccccgttgcccaggctggtctctaactcctgtgttcacagggttttgctatgttgcccaggctggtctctaactcttgtgccaccatacccagctgattccattttctgactttgaccactgcattgaaggggatatactggcaatattattatcactggggaaactaaggccagggagccatgccttatgggctgggactgtttcctcagctgctttcacgtaagctttggtggcctgccctctcagcaggaaagacagggatggctgtcaccggcaggcccaggcccagcccctcagccaagtagggtggccggaggatgccattcagcactggctccccagcccagggctcaccgctctcatccaggccctccaggtgtactgtctggtggggtgcagtgccatccaccatgcactccaagatgctctggaccagagccggctggtttcctgggcaaaccctgaggtgctccccctgcacacaggtatttcaggccttggctgtcctcatgggagagttccactgggatggtgaggtggctggggaaggaaaaagaagcctcaggtgggccgggcactgtggctcatgcctgtaatcccagcactttgggaggctgatgtgagcagatcacctgaggtcaggtgtttaagaccagcctggccaacatggtgaaaacccgtctgctgggagcaggccccaagactggccataaacaagatctctgcagcactgtgacatgctcgtgatagctatgatgctcacgctggaggttggtgatttaccagaatgagggcaaggaacacctggcccacccaggttggcaaactgctcaaggtgttcctaaaccacaaacaatggcatgagagatctgtgccttaaggacatgtccctgctgcagataataagccagagcctgtccctttgttctcggtaaagaacacttttagttaatctataaacggcagaaatgacatttatcatagcttactgtcaataaataggtggatcaagctctgttcaaggctctcagctctgaaggctgttagcccccaatcccactttgcatctatttctgtgtctgtgtttttattcctctagtgctgctgggttggggtccccacgactgagctagtctcatcaactggcatccaaatgtggggctcgaacctgggttgaagggctgctggagtgatggttgaagaacgtggaactatgctggaggacactcaagtgctcttaagcaatccccatggtgagaaagaaggggagctcagaagcatcagggtaacaatgagacaagggtcaagcagacatgaggcttatttgagttggcttcagcagctccttgaaaaaggagttaaggttagcactagccaacttatgccattttttgtgcagcagagaaatattgcccctggtttccaaaacgaggaactatggaggtagaggtctgggagatggtaggtagcgcactgaaaaaggcatataaggatggtgctgaggatattcccataactgtctgctcagtgtgggctctgattcattccaccttggaaccttttcacgttgaagatgaggaaggagacaaagaagaggaggaatgtgatagtgttgtggaagagataaaagaacagatctgtccactgcttaaagagacccaagaaggggaagcttgtccctgccccttggcactccctcaatatcttgaagatagagaatggcctgaccctcctgatctttcttttctggaggacactgggtgaaaagaagtcaccccagtgactgtttgagcagtgccgcaagggaccaccctcagttctattcaggaaggaattcaacaagctagaagagagggtgatttagaggcttggcagttccctcaggatacacccccagatcaacgggggaatgttatggctacatttgagccttttatctttaaattactcaaagagtttaaacaagctatcaatcaggatggaccaggttctcctttcatgatgggtctgttaaagaatgttgctacctccagtcagatgatctccattgattgggatgctcttactcgagcctgtctgactcctgctcagtttttacagtttaagacctggtgggcagatgaagcttctactcaagctgcctgcaatgcacaagttcaacctctgattaatataactgcagaccaacttttgggagtcagtggctgggctgtgttagatgcacaagtggtcatgcaggacgatgctacagatcagtttagaggagtgtgcattagagcttggggaaaaaaatctcttcaggtggagaacaataccctttttttagtgctgttaagcaggggctgaaagaaccttatgcagattttatagctcagtttcaggagtctcttaaggtgattgcagattcagctgctcaggatatagtgttgcagttattagctttcaacaatgataatcccgagtgccaggctgctctgtgacctattagagggaaagcacattttatcaggggaaccagcccccaatatttcaatgtaggttcttttctagttccctaagaaataaagagaaagaatacaaaaggagaaattttacagctgggcctccaggggtgacatcaaacgttggcaggttccatgatgcccacctgagccacaaaaccagttagtttttattagggatttcaaaaggggagggagtgtataaatagggaatgggtcacagagatcacatgcttcatagggcaataaaatgtcacaaggaaatgggggcagagagagatcacaaggccagggtgaaattagaattgctgatgaggtttcatgtcccactgtgcatacatggtcattgataaacatcttaacgagaaacagggttcgagagcagacaactggtctgactagaatttcaccagcctagaatttcccaatcctagcaagcctgagggcactgcaggagaccagggcgtatttagtcccttatctacaactgcataagacagacactcccagagtggccattttagagccctccccctgggaatgcattcttttcccagggctgttccttgctgagaaaaagaatttggtgatatttctcctattcacttttttttctcatcttcctttttttttttattagaaagtcctattttattattagaattattagtcctatttttattataattattagtcctattttattattagaagtctcatttgcctattttataggcaaggaaacagaagcccagagaaagaaatatgactctgttctgcccagctccacaggcagtcagaccttatggttatcgctcttgttccctgaaaatcactgttatcccgttcttttaggatgcccagatttcatattgttcaaacacatatgtcttacaaacaatttgtacagataatgcaatcatcacagggtgttgaggtgacatacatcctcagcttatgaagatgatgggattaagagactaaagtaaagacaggcattggaaattttaggagtattgattggggaagtgataaatgtccatgaaatcttcacaatttatgttcagagattgcagtaaagacaggcataagaaattataaaagtattaatttggggaactaataaatgtccatgaaatcttcacaatttatgttcttctgtggtggcttcagccggtccctccatttggggtccctgacttcctgcaacacctctccctttcctttcatataaatgtgccatggcaatgaaggcttgttcattctctcaattttgacacaggattcttttactggtctgacacactaaagacaagctgattaaatggagaatcataattccaaaatttactacactggagtccccaattgacttaatccaagtcatggggtttagtccagaaaggttttctgccacctgatctaatgcctcagctccaggcacaatggataaatgagcttgagaggcttcaaaaatttgtttctttaatttagttatgtccaatggtaaattgtcttccctacccagaaggtgtcctttgaccattttccatgaatgatcagtctcactgtaggaatatggtgtaatccagaaatcagaagtgctccaatcacactgcatttgcatgcaatgttcgagactcactacccaatctccaagccaaataacagactgtcttaaatcattaatttgattagccaatttttgatcaatactttgctgagaattccacatttgggtggaattggcttgccaatcattaacaaaatgagccatttgaatagactgatataacaccattccagcagtggtggccattgcagtgaccataattaggcccatgatcacagtgattaaagtgaaaacaaatatcttagatctttttgttattcactgtaacacttcattaattaaatgtatcgagggggaggattcccaaggtctgggcaaagttaacggaatccagattccttcttgagctcaaaccaacattacacttttcctggagtcaaaatgggagttaatacaagtgtataaatgacaatcaatgcattggacagtttgattgttagtccaaattttgattttcccactaacagcatgtaaggaggcttaacacaactctgtatgggaacagtcaggttggaggtaagcaaagcaaaatgtctggatctatgttgatactgagggagagggatggtagtggggacaatagacagaaaagtttccccttcccatactcacggtccagacatggtaagagccaatttccaaagttctgggtgttcttggcttagaatggggaatatcatatgaggcctcggggggggggggggtaatgcctttatcttcccattttaagggaaagaatgagctgaacctcctatgcaaagtagaatgatgattctcattctcccgataagaaataaaataagtagcctccaggcattcccttctggagaggagcaattgttttttaaatagacctttggtgcccagtctattactaaaccatatgagccattttttaatattactgcatgtgggttaacacaatcttcccaaattaaagttttagatgggccctcaaaatttttagggcatggttttcctgcaggtttatattgaaagtatggggtatctcccattactccccctttcatttgttttaaaggagaaagggagaggctggagacaaaatgtcctggtttctctgtagctgatctctctggaagataagcagcccagacttgggtttctagatggatacaaccagatgcatgtctgaggcacaaagagggggtatctataacccatagtaacattaaatgcagtgccttcttcttctggttgagcagggcaatgcttatctgtggctccaggcatccacaaactatcattagtgtagatttctgcagaagcatccatccaggtgagaggtcaaatgagtggaggaaaaggcacataagcccagcaagaataattttgtgtagcaggtaaatcagtgtgagaggaaactggtgagacagaaagtataaggaggacaatcattaaataaaacctgttgtaagtgagattcagtgctgaaggaggaagagaagaacagagggatgttatttccaggtaatagaaatggtgagatttttaggtttgtaaggagaaaaagaaaggtatttaggagaagtgggattagttagatgggtctccgttgccatcagggagtattgaaccaggcccattttgatttggtgtgccagcttctgaggagttggcacagatctcaccacatctcagggtggtctgtgacatggacgtcttttccctgtggttttcattgttagtattcacacgaagcttgagtctcctagtgggcacccagacaggagattgatgatctcctggtgaaacacaagcatatcctctcccccacattataattgtgccaggttcccaggtattggtttgggagtttttccataacactggcttgccttcgtttagggagaattttttgcctgtataatggtgtttggctgcagttagattattatctttagggacatttacaaaagttaaagtaaacaatgccaaatataattgggaatggggggtagttaaattatgtttttgttgttcagactgtttgggcaattgagtttttaaggtgcaattgacccattgcaccacagcctgtccctgaggattgtaagggattctggtagtatgggaaattccccattgttgcataaataaatcaaaagccttactaacatatccaggggtggtgtctgtctttatttgatatggaagccccataactgcaaagcaagaatacaaatgttttttaacatgggccatgccttcccctgtttggcaagtagcccagataaaatctgagaaagtatctacagaagcatgcacacatgaaagtctcccaaaggagctaacatgagccacatctatttgccataaatcattaggagttaggcctctggaattaacaccaggttcctgatttggaagtataaagacctgaccctgagggcagctgtgaacaataagcttagcctccttccaggtgacagcaaattcatcttttaatacagcagcattgacataagagagattatggaactcctgagcttcttgggttgcaaaaaagaccaaacagtcaactttatggttaccagcagacatgggtcatggtaaagtggtatgaaatctaatatgtgtaatatagaaagggtgtttactgtttatgttggcaaacttcctgttgtagccttgaaaataaagaagccagttcagaattatcaatatatttgatggtagcagtttctatatttttagtggcatgtacaacctaagcagaatcagagacaatatttaaaggtttggggaaatcctgtaaggcagtaatgacagcaattaactctgccttttgagcagaggtataagaggtagaaataagcttgtctgtaggacgtacataaccagcatttccattactggagccatcagtgaacactgtaacggcctcaggaatgggctgatctttggttaatcgagggaccacccaagacgtcatttttatgaaatcaaacaatttgttttttggataatgattgtcaataacaccaataaaatcagccaagtgaatttgccacagtacagaatgttgaaaggcggcttgaactttgagccgatttaaaggaactacaattaaattcagatcaaacccggaaattttaagtattctgcactgtgcctgtccaattagagtggctgtttggtccaaataaacagacaaagttttcaacacagaatgaggaggaaaacaccactctactaaatcattatgttgaactattagtccagtaggggagtgcaatgaagtgaaaaagagaagctgaaaaggctgagatggctgtactctagataactgggctgtctggattccttcttctatgaattccagttctagtgaagcctcagggatcaaagtcctgggactgcagagattggaatctcccaatagcatagaaaacaagttagacagtgcataggttggaatgcctaaagtaggtcttaaataattaatgttacccaagagtttttggaagtcattaaagttttcaaagaatctctcctaatctgaactttttgaggttgaacgtgttgattatcgaccaccattcctaaatattgaactggagtggtctgttgaattttatcctgagtgatgtgtaatccagcctctgtaacacagcagctcaaaatttgataacagtcaattaattctttatcagtgagggcagcaattaaaataccatcaatataatgaagaatataggcctggggaaattgggcttgaactggtgaaagcacttgtccaacataaagctggaagattgtagggctattcagcattccctgaggaagtactttccattgataatgagccatatgctcttgattattgatagatggtacagtaaaagcaaatttttcacaatccaatttatgtaaagcaatataaaaaaatctttaagatcaataactatgagagaccaatttttaggtattaaagcaggggtaggcatgctgggttggaaggctcccataggtttaattacagcattaatggcccttaaattcatcaccatctgccacttgcctgatttcttttttactagagacacaggagaattccagggggaaagagaaaattccacattcccaagttgtaactgttcagaaactgtccattgtaaagggatagaatcaggaggcatggcagtggctgccattaaaaaggataacttaaagcaaccctgtcttcttttacagtaattgggaaggatttagtaatcccttcatgttttggactgagtccaggaacaaaccccatgttttctatcatatgctgactgggagcactataagagttatgtgtaatattaatttcagtctcccattgtgccagtaaatctctaccccaaagattaatggggattggcatgatataaggctgaattgtacccttttcaccatcagggccagtgcaaggcaagataaatgtgctcttgtaaacttcatcagcttttccaacacctactagtcccatgttactgggatgtttaagccaggaagaaggccataaattagaggaaataatagaaacatcagccccagtatctactaggccctcaaacttttttccttgaatgtgcacgtgggccattgtttagaaattacattaatccaataagcagtcttttcactgccagagcccgtcccatggccacatgtcttatctcctttgcttaaaacaatattaggtagtaaaagcaattgagcaattgattcaccggatggaatgaaaacaggaaccttggcagacatgattagtttaatatcatcaatggaatcaaagttaatgagatcagtatgaatggtgattcctttagcagaggtagatgctctacctaacaccaggcccaccgaacgttgaggtaaatggccagtgaccccatggggacaattaaaggcaaagagttaggtagtaaatttagaggaatagtactacagagattgactgccccatgccttactgtggagatggacaagcattgtactgagacagaaggagaggctgggacccatatgggttggctgtaggtaaatttgtttgttctgggggctgcattgggaccacctgaagcagaaacacaagattggtctgagtctgaagcatcccatttgatattggggcctgggacttgccctgcttcctgtttccctggttttgtggcagggagtttccatctatatcattcttagagtggcaagtacttgcccaatgtttacctttgcgacaatgtgggcaaacagtagcagcagcatttggccatgtttgttgagccagcttggtcacttttaagtttttaacagtgcaatttttctgaatatgaccaagttgactgcaattatagcaggctccaagaaaagaattagtggggccagtttgattggtgtccttcatggcctgtggccacagaatacctttgtgggtgtctgatccaatgccttcacaagctttaatatatgcaggcaacacctcgtgatcaggtaaattttgtcattggatggaacacatggccattttacactcatggctcacattttcaaaagctaacataggaaggagaatacctacagcatgctcatcagagacaggtttttcaacagcatcttataatttagctaaaaaatcagggtataattcagtgtgaccttgtttaaccgtagtaaaataaacaggagcttggcctggggcacataatttatcccaagctctcatacacacctttgttgcttgttctgtggtaagagcatcaaagtttaattgggcataagtatcagagaaactatcagagcctgtgagctgagcctgagtaattagaaagctaatagtccaatttagctgggcctgcaaacgggcctcctctgaccaccaggtatgaaattgtaaatgctgagatggggttaaaacagctttttccaaaaggtcccagtctaaaggaagaaaaatgacctcagtacaaaaagttagtaataccattttaacataaggagaagtagggccatactgagtacaagcatccctaaattcttttaaaaaggtaagattgagaggtacataatgacacatttgtaccccttggaagttgggaggttctagcatgactggataagcccacgcatctaatccatttgtttgtttattttggcataataaacattgcactgaagttttaagagtaggcatctgagacagagttggcatagatgtgacaggaaaagcatgtgtagattagggaaactgagggtgagggggtcagaccagaatgagagcatgagaaatgggcattgggggagcagaaggagcagaagtatactggtgattactggcatccctgtgtgaagaagggtacagagaagcaggctgagtggatggcaaagtgactggttgaggaactgaaatgaccagagggtgatgggctgcagtggatgggggagggcctgaataattataggtaaattgtagtttggtcccagagccattagctgactccagaggtttgaagagagaagaatttgcatatatatggtcccgggctgtctgagttggggccatgggagctacaagtaccagctctttgtgaaaagaaataaggtcatcaaggggtgacattaagccaaagtcactggagttagatattgaattgtcagcatcattaattgggggaagagtaggcgaagggagaggctgatcagttaacaaaggctgtgtaggagaggaaggttgaggaagaggtggagggtcatcagattcagaaaattgtggtaactgtagggagtcacgggattggtatgtcattaggatggcacatgccaaggcccaatcaccccaaacagtgatgggaacataatttcctgttgagaccagttcctggaatgttgtgccaacactatcccatagttctacaactaaggttcctttttcaggaaactaaggacagtgttcttccaccgccctgaatagagtgaccatattttccatggttactcagactctgccctgtttttacaggagtttaatatagcagaggtaagcatgaagtttagactccatgtggcccatagttaacctggaccatacacagactactcaccagttgtcagggagtcgaacaagtgtttccttggactgaaccaatggcatttctccccacctatcaaagggaattgggtttgcacatgcacttaggaaaaaagaaaaaccacactgggtgccagatatcaggggaaccagcccccagtatttcaacgtaggttcttttctattttccctaagtgtcagccagtctgagaaataaaaagggtgcaaaacagagaaattttacagctgggcctctgggggtgacatcacatgttggcaggttctgtgatgcccacctgagccacaaaactagcaagtttttattaggcatttcaaaaggggagggagtgtactaatagggagtgagtcacagagatcacatgcttcatagggcaataaaatatcacaaggcaaatgggggcagagcgagatcacaaggccaaggtgaaattagaattgctcatgaggtttcatgtcccactgtgcacacattgtcattgataaacatcttaaccagaaacagggttcgagaacagacaactggtctgattagaatttcaccaggctggaatttcccaatcctagcaagcctgcaggcattgcaggagactagggcatatttcatcccttatctacaactgcataagacagacactcctagagtggccattttagagacctccccctgggaacgcattgttttcccaggactgttccttgctgagaaaaagatttcagtgatatttctcctattcacttttgcaagaagagaaatatgactctgttctgcctggccccacagggagtcagaccttatggttatctctcttgttcactgaaaatcactgttatcctgttcttttaggatgcccagatttcatattgttcaaacacacatgttttacaaacaatttgtacagataatgcaatcatcacagggtcctgaggtgacatatatcctcagcttatgaagatgatgggattaagagattaaagtgttgaacaatgtaaacaatcatgagaggaaatacgctgttggggatgatgctcagtttgagatggacatctgactcttctgcaaggattagaagaaaagcagcaatgtagatacttgtgtgcacatgatttggccaataggatcaaccatgaaagacagatgatgcactaccagcagtccccattacagtctctacctccccctcttcttctgggtggcaagtgatgggaagatgatcttcatctgaccacttcttctacctgtctcctgttcccctttccggttaaacaggatagattgaaggcctttggtgtatttctgtagagctaagcagcccttagaggaaaacaaataaattggatttcctagttgttttaaaaaaaagaagaagaagaagattaaagtaaagacaggcattggaaattataagagtattgattggggaagtgataaatgtccatgaaatcttcacaatttatgttcagagattgcagtaaagacaggtgtaagaaattataaaagtattaatttggggaactaataaatgtccatgaaatcttcacaatttatgttcttctgtggtggcttcagccaatccctctgtttggggtccttgacttcccacaacaacatttagttgattatatcaaggcctttgacagtatcaaaggtaatctgcataaagctactctgctggcacaagccatggcaggactgagagtgggtaaaggaaatgctctgtttcctggagcttgtttcagctgtgggaaacatgggaatacaaagagaatgtagaaaaaatcagagggtccaaatgcccagtgttggaaaaaagaaaactgctgaaccaggtctatgcccgaagtgtaaaaaaggaaagcattggccaatcagtgtcattctatatttgagaaggatggaaacccagttttggtatatgccatgagggccccgccccaggccccattccaaaccagagcattcgtggctcaggccactccctcacccctgtacaatgcttgttccccaccacagctggtggtgccacagtagatctgtgttgcaccagggctgtgagtctcctccctggagagccaccgtagaaagtaccaacaggagtctgcagacctctgccagcaggaaaggtaggactacttctgggaagatctagtttaaatttaaaaggagtgcaggttcatacaggagtaattgacttggattgtaatggggaaatttgaatcattatatctatctccattccttggaaggcagaactgggagagcatatagtgcagcttctgattttaccatatgtgggactaggaaaaagtgaaactaaaagaacagggggatttagcagtacaaataatcaaaggaaagccacctcctgggtaaatcaaattactgataagtgttctacctctgaaataactattcagggaaagaaatttaaaggtttggtagatacaggagcaaacattgcaatcatttatctatagcactggccatccatgtggccaattcaacccactcaatttaacatatttggagttggtaaagcccctgaggtatatcaaagtagttacattttgtattgtgaagggcccaatggacaacctgggactatttaacaaattataacttctgtacctataaatttatgggggagagatttattacaacaatggggagcacaagttttaattcctgagcaattatacagccctcaaagccaacatatgatgcatgaaatggggtatgtctctggtttgtgcgtaggaaaatatttgcaaggtttgaaggaactacttcaagcagaaagacaaagttcctgccaaggcttggataccatttttgatggcagtcattgttaagcctccagagcctatctcattaaaatggctgacagacaagccaatatggatagaacaatggccactgaataaagagaaactggaggctttaaatgaactagttaaagaacagcttcaaaagggacatatatttccaacactctccccttggaattcctcagttttcataattaagaaaaaaatcaggtaaatggagaatgttaactgacttaaaggccattaattcagttatacaacctatgggggcattacagccaggactgccttctcctgctatgattccaaaaaattggcctttaacagtcacagatttaaaagactgtttctttactatcaccttagctgagcaggactgtgaatggtttgcatttatgattcctgtggtaaacaacttgcagcttgctaagcattttcactggaaggtgtttccacatggcatgttaaacactccatccattttccagacttacgtagggcaagaaattgaacctactcataaaagattttcacagtgttacattattcattatatggatgatattctttgtgctgcccccacttgagaaatattactccaatgttatgatcacttgcaaaatttctcatgccagtttaattatagctcctgacaaaattcagactactactccttactcctacttagggaccttagtaaatgacactacaatagtgccacagaaagtaaccatatgtagggatcaattgaaaacattgaatgactttcaaaaattactaggggacattcattggatatggcccattctaggcattcctacttatgccatgagtaatctgctttctatccttagaggagatcctagtctcacaagccctcagaaattaacaaaagaagctgaggcagagcagtagctaataaaaggcaagtccataaggcccaaataaatagaatagatccagagaagactcgagatttgctaattttttcagctcagcattcagctaaaggtgttattgttcaagagcaagatcttgtagagtggctttttcttccacatactaattcatggactttgactccttatttggatcaaatcgctactatgataggaaatgggagaactcagattgtttaattacatggatatgatcctggaaaagttattgtccccctcatgaaggcacaaatatagcaagcttttataaatagtcttacttggcaaatccatttagctgactttgtgagtattctcgataaccattttcctaaaatgaaactctttcaatttttgaaattaactaattggattctccctaaaataactaaattcaaaccaattgaaggtgctgagaatgtcttcacagatgggtctagtaatggtaaagcctcttattctggatcaaaaggtaaagtttttcagacgccctatacttcagctcaaaaagcagagcttgtagctgtaattgaggtattgactgcttttaatatgcctattaatgtgatttattattcttcatatgtggttcattctacagagttagttgaaaatgctcagctatgattccacacagatgatcaacggatgactttatttacccaattgcaagagcagttagaagtagaatgaacccttttttacatcactcacattagagctcatacacctcttccaggacctttgactgcaaggaatcaattggccaatcgcctagttgctactgcaatatctaatgctagacactttcacaatttaatccatgctaatgtctctggtctcaaacactgataaagcattacctggaaagaagctaaagctattatccagcgatgcccaacttgccaaatggtgcattcctcatcttttacaagaggagttaatcatcaaggattggaacctaattctctttggcaaatggatgtcatgcatgttcccgcatttgggagactagtttatgtacatgtatgtgtggacaccttttctcactttgtctgggctgcatgccaatcaggagagtcttctgcctgtattaaatgtcaccttttgcagtgctttgcggtgatgggcattctagcttccattaaaacagataatgccccaggccctactagccaagctctagctacatttttctctatatggaatattaaacacattactgatatcccatataattctcaaggacaagccatagtggaaagaatgaatctctccctgaaacagcagttgcaaaaacagaaaggaggagacagaaactataggactccatacatgcaactaaatctagcattattaactttaaattttttgagcctgcctaaaggctgattgttattagcagctgaacaacatttacagaagccagctacaaaagcagaagtggaaaaatgggtttgctagaaaggcccaataacaaaagtttgtgaaacaggtaaaataataacatgaggcagaggttatgcttgtgtttctccaggaccaaatcaatagccaatttgggttccatcaagacatctaaagccctactatgagccagatatcaaggaaaaagttttgggaggatccaaaagaccaactggtggcagcgttgtccaagttgatgctgaggaggaccccaactgtcacgagcaatccccgtctaacacagccacctacctggggacagatcaagaagctgtcgcagatggtggaagaaaacctgaggaaagtgggacaaccagtcacaatgagtaatttactgatagctctgatagctgtgattaccattgccataagtattccttcagcaagggctgacacagagaacaattatacttactaggcatatttaccttttccaccacttctatggcctgtaacttggctggaccccccattggaggtatacactaatgatagctcttggatgcctggtcctacagatgatagaggtccatctcacccacatgaggaaggaactgttatgcatatttctttaggatttgaatatctgcctatctgtttaggaaaggccactagttgcctatccccttgctatcaatcttggctggcaataatgcctggacataatcactctatgatgcagttttacatgctttctggtctcagtatttaccataatgaatctgctcctgtaattgaggcataccaccctcaagaacctatttgtaaacagaattggacctggttagaaataatgaacatacttgtttgggaaggttgcattgcagaggtgctgcacaacaggcagaggtgctacacaatgattcctatggaatcattattgactggtcccctaaggggatgtttagcatgaattgcatctctcagtctgcgtgtgatggccacactatgttcagctggtctgaacaaaatgatcagttggtagaaatgataagaagtatggcaagatttcctattatctggaaacgtggcggtatggtggcacctcaacttcaaatgatcctgataagatcaagatttgggaagaaaaatatactatgccattcacattgtaatcctaattacattttagaacttgttgaaaacaatactatttggatacaaagttgtgttcatcctgcttttctgttggtaatgggcaatctaaagtttggcatccctaattatcatgtaactttccaggaatgtagattgttctcttgtgtgaactctccttgtttaatactaatcattctattctagtagagagtgctcaagaaggagtatggttactggtgaagctttcctgtccttggaaagcctttccctctgtacatattattactgaaattcttcagaaaattctgagacactcttgacatttcattgatactttaatcttgattattatgggaatgatcgctgtcacagctactgctgcagcagctagagttgtgctacattcatcaatgcacagcagattttgtaaataaatggcaaaagaattctactctgctgtgtaactctcaaactaaaatagaccaaaagatagttaatcaaatcaatgatctccaacaaactgtaacgtggctgggagattgagcagctagtttgggatatagaatgcagctaaaatgctactggaatacttctaacttttgtatcactcctcacccttataatgaatcagagcatgaatgggaaagaataaaaaagcatctagaaggacactctacaaacttgtctttggatgttgcaaaactaagagaacaaatatttcaagcatcccagggacacctgaccttaatgccaggaactggagtgcttgaaggagttacagatggattggcagccataaatccttcaaaatggataaaaacacttggaggctctgtgatttctatgacggttgtgttattaacctgtgttgtttgtctttgtgtagtctgcagttgcagatcccgactcctgcaagaagtagctcaccttgataaagccgtctttgtatttattgccctgaaaaaacaaaaagggggacatgctgggaacaggccccaagactggccataaacagatttctgcagcactgtgatatgctcatgatggctatgatgctcacgctggaggttgctggtttaccagaatgagggcaaggaacatctggcccacccagggtggaaaactactcaaggcattcctaaaccacaaacaattgcatgagtgatctgtgccttaaggacatgtccctgctgcagataacaagccagagcctgtccctttgttctctgtgaagaatactttcagttaatctataaactgcagaaatgatgtttatcacaggcttactgtcaataaataggtgggtcaaattctgttcaagactgtcaggtctgaaggctgttagccccctgttcccactttgcactctatttctgtgcctgtgtttttattcgtctagtgctgctgggttgcggtctccatgactgagctggtttcagtgcccatctctgctaaaaattacaaaaaattagccagacgtggtggaagctgtaatcctggctacttaggaggctgaggcaggagaatcacttgaactctggaaacagaggttgcagtgagccaaggtgttgccattgcattcctgcctgggcaacaagagcaaaacatcttctgaaaaaaaaaagaaagaagaaagaaagaaagaaagaaagaagaaagaaagaaagaaagaaagaaagaaagagaaaagaaaagaaagaaatagttgctaaattttctcaatactaaaaatatttgcaactgggtacagtggcttacgcctgtaatcccagcactttggcaggccaaggtgggtgatcacttaaggtcaggagttcgagaccagcctggccaacatggcaaaaccccatctctactaaaaatacaaaataaattagtagggcatggtggtgcatgcctgtaatcccagccactcgggaggctgaggcacaggattagagctgccaacaagcccagctaatttttgtatttttagtagaggtggggtttccccatattggccaggctggtctcaaactcctggcctgaagtgatccacccaccttggcttcccaaaatgctgccacccttggcagtctgaatttttaaaaagtaatgaatattcttaatatcttttaaaaatacagtgatatgaaaataagggaaaacgtttaaagattattttgttctttacaattctcttggttctgttcttttttgattagttttgggattaaatttattgggagaggtccaaaatgatgaaatttgaaaataagctctattaggtgcactattaagtagaaagagcctctcaagttttctcctaggctctttgaagttattttgtttgggaacttttttcttcctaattctgcctcataagacaaagtactgggaggtacaaaggatagtgatttaatggcactgttttcctaacactgaattattttcatttgaaagaagttgatcactcttcagaaaagtaattgtaaagttatttttacccttggttcatttgatttcttaaacagcagttttcccgacagaaatttacagtgtgatgacaatacataactggttcagtgagatgaaaatccaataatcagcttatgttgggactggatgttgatttattacaggattatacacatgaattccataaaaccaaagcaaactttatggcaatatgggaaagggagaatctcatgggatcagtacaaaaagatattgagtaatttgccttttatattattttgtagaatatttattcagatttggctttaggatatgttcacagttaattacaaattgagtggcagaaccatggttgagatttcaggatttccaattcccatttcactgtcttttaagcattgctgctacaatgtcatcctaatctacttttccatttttatctcatgcttccccttattttatcattggctcctgccaaccttgactttcctgtcttaattccaagtccagcttagatggtatcatcatggttccctgatctcttaccacacaccctaagaattataatgttacctttatgatcctctgcagatgtgtcaaatacatttttttaaattacaacattatcagtaactgaagctttccatgtttctcttcctgattatcacctatctctgccccctcccttgtcccaacaattatatattataaactataatacatatacaaactcatagccttaatgttaaattatttaaggactgtcaacatttttatgctgatctcaatctataattttaaatattttttaggtgaggtcatttcctctctcctttaataatctattctagcatttcacacacatttttggaaactttttcacaactgaacactactgacaatgttaagtcccatgggcatctcactgaagctgaacactttccaatttggagctatctaatgatacctgtcatcgtctcacttgtgatatattatgtgataagtttcataaactatgatatacattgatcataaactatatattatgtatactctcagaaacacttccctagagatcctttatactgttgtaacaggttcaacagtaagacagttgtaagactttttagtccttcaggacatgtaacccttttgtttttgtttgtttcttttttgagacagagtctcaccctgtcacccaggctggagtgcagtggcacgatcttagctcactgcaagctccacctcccaggttcacaccattctcctgcctcagcctcctgagtagtggggactacaggtgcccaccaccacgtccagctaattttttgtatttttagtagagacggggtttcaccatgttagccaggatggtctcgatctcctgacctagtgattggccctcctcagcctcccaaaatgctgggattacaggcatgagccactgcacccggcctcaaggcttttgtttaatttccatacagtccatttacatatacattttgaggaatgcattgagaacctgtgtaggggatggcctttaatgtatagacattgagcaccccccacacacaatgtgtgggaatcactagaatgcaacccattgtaataagttgctttttgaaaaatggccataaaagatatgtttgtctattccttaaactagctcctgagtaccaactctgagttagtcacagtagaatgtagaaatgaaaagaccaatgtggccctgtaggagtttataatccaggtgctagaggaaagtaaggcaggtactcaagtttgtataatccaaggccgaatatgattagtgagatgagatgataatagtacctaacattgtgtgtgtgtgtgtgtgtgtgtgtgtataaatttacacagtattttttatgtattatcttttttggcttcataataatcttttggttaacatagaaattatcagtctcattttacaaaactaagtattgagcacacttgtctaagtgaagcggctatgaaatgctggagtatagatttaaatccaagtcatcagtcccccaagtccagtgtgttcttggttatatcattctgctttcttcggtggtgttttctcctgtgctttgcacagtagccctgcgtctcagccagtatttctgttttagcagcatgactctcttttgtcttattgtagtatttgcatggttaacttgaattttaaaaatttgaggccaggcacagtggctcacatctgtaatcctagcactttgggaggccaaggcaggtggattgcttgatctcaggagtcctagaccagccaggggaatgtggtgaaaccctgtctctaccaaaaatacaaaaattaggtgggcatggtggcatgctcctgtactcccagctacttgcgggcctgagacaggaggatcacttgaacctgggaggttgagaaggctgcagtgagccgagactgtgccactgcactccagcctaggtgacaaactgagacaccgtcaaaaaaaattctttgcttgatttcagtgtttcttaggcttcatttggtgggctgcatgcactattgtgaaggaaaacattccattccaactgctttcccaccccatgtgctagatactaaatcagtgctacattttacttccacctggagaaaatgaagatatcagagataatagacaaaggaaaagtaagattttttgtttgtttgtttgtttcagaatgttgagttattttggtgaaaaacatagtaaactgttagaactaaaatagaggcataatatttatctgtttataatagatatcttttttttgagatggagtctcactctgtcactaggctggagtacagtggcatgatcttggctcactgcaacctccacctcctgggttcaagccattttcctgcctcagcctcctgagtagctgggaatacaggcacatgccaccacacccagctaatttttgtatttttagtagagatgtggtttcaccgtattgcccaggatggtctcaatctcctgaacttgtgagctgcccatctcagcttcccaaagtgctgggattacaggcatgagccaccatgcccagccaatagatatcattttttagggcaaaaggaaaaggattatgcacttttatttttcattcacagctatgaagaggctcaatttatctactttcaagatcactagggtcagtcagttaatctgattttgtattctctgccaattttttttttttttttgatggagtctcactctgtcaccaggctggagtgcagtttcatgatcttggctcattacaagctccacctcccagtttcaagcgattctcctgcctcagcctcccgagtagctgggagtacaggcacgtgccaccatgctcagctaatttttgtaattttagtagagatggggtttcaccatgttggccaggatggtcttgatctcttgacctcgtgatctgcccacctgggcctcccaaagtgctaggattataggcatgagacaccgcacccagcccaaaaatgtttttaaagtttctcttttgtcccaggtcatataaaagtcagtctggagtaaacaacagaagaactgagctatttttgaaagaacacgaccaccttcaaaagtaggtattattgaatgtatgtgcattatgtggttttccatgtttattaatttatttacttatgtaacaaacattttattatgtttatcatagtaagtgctttatccattctaattcattttattcttctgactctttttaatagaaaagaaattgcaactattctgaccataatgaggaaaggccttgtgctcttgagtatttcacatcacttaattgttaccttaatatgttttttttattgccttagtgtgttcttttcctcagcaagtcttgctttaaagcttttgtccaatactacaggttattagtaaaaataagtctgggtgtggtggctcatgcctgtaaacccagcactttgggaggccgaggcaggtggatcataaggtcaggagttcaagaccatcctggccaaaatggtgaaaccccatctctacaaaaaatacaaaaaaattagctaagcatggtggcaggcacctgtaatcccagctactcaggaggctgaggcaggagaattgcttgaacccaggaggtggaggtggcagtgagctgagactgcaccacagtactccagcctgggtgacagactgagattccatctcaaaaaatacaaataataataataataatcaaataatgacttatgtttgaatggcctgttaccacttatatataaagaagccttataaagagacattggatcatataccaaatttttaaaaagtttttattttccaggatttcagaagaaaatacttaaatacttggatgaactgtatatatatcttaaaacaagctgccatagtctgcttcattatttttctacttttctctgaaatgtacaggtttctttgtccttggatttatgttttgttgtagaacttacagatcagaaaattacttatctctatggacttagcctataagcacttgagcagcttgtatcggtgagagttaagtgttaggaattatgttgacatttgctactgaatgtcataaattagtcacgtcttatgggcttaacatgctgttcaatttagttttctttaaaagtcaccactttaaatataagctgttgaaatcaaaacacagaaagatccagacctttttagaaacctgggtgctcccagtgttggaactagttttctgaatctgttggatgttattgatttgcacaagggggcaggctcttctagagcatgtttagtttgtagtattcatagctttggtagttcttttggtatttgacaaagaccaccataaaaagaattttgcattgtatccaaaattatattaatctattctgggggaacacagtaatttaagggatagcatattctagtagcataaaatacagattagattgcataagtatctctatatttactgcctcaaaagaaacagaaatgcagtagttgactttgacaagaatgatttgatgctgagaagagtctatcagttattatatacatgaatattctttatttcatgacttcagaacacatcacatattaaaacttttctatgaattttgcagaaagttttgcatttgctttaattattcaaggtaaatccttgaggagtttaataccattcattttacaggaaaatgaagcaattcaagtatacacatctttaataatttgtttagggttacaatcatggtgagaagatggagatcaaaaggtatttttccatttttgtttgatcaaagtataaagtctcaattttacatataccatactttatatatattgtatagtttatgtacatttatttcaacattcttgtgaagaagtttgtgtgtaccaattctatgcagagagaaactgagacaggatgaaattgaatggaataagagcttctggaattagagaagttgttgagtctgaaaaccagggcttagtcattgttctcaaaatgagaacacaagcttccaaatactttttttagtcaattttgttttgtaaattaaaactgctggctagataataaaataacattaaaattattaataaaatatgtttataaaataatgtaaaaaactttagtttttcaatgttattgtatttcatttgctaagtgctttgaggaagaagcagcaagatatttttgaaataacaaaagctattaatgtgcttttgtcatagtgctcattttaaaaagtatgatagttcaacaacataaaaagaaaatttaaatcgcacattaatacaaattttgtaacttttttactctttagtagattgcacgtagttttcccatgtagtttgattttttaaaaatatatggtgcatatattgcataatacagataaaccataaattatgtaaccatttccctaatgttgaccttttggattattttctgtttttactattatacatagtaaattctttgcatgtatctatcattattttcttataattcctaaattagaattgcaggattaaagaacatactcatttgcaaagtttttcctataatgttcccaaatttccaagtttgattttttgcagtagggtcagactttttatggctacaactatgtctaagcttgtgcttcttcacaaatattgttttttcacgataatataaatttttacttgttccaaaagaacatatttttgcctggaagaagagtaaatcaatttttgtaaatgaatgccacacacacacacacacacacacgcaactaactttgtaatgaattgtttttaccagctctccttaatactctttttatctaaaaatcaatgtttttaggttttagcagtttgtgttataaaagacagaaatttcttttcctatagggtggataaggtaactttcatttttgtcttgctttccctgagtctgtcagtcagaagaaaatactgactttgaattagtgtcaagcttgtaactagttgtttttcactggactgttgatacattcttagagattttttcattgctgtttagattattttctcttcctttctacaactgttctctttcagctctcccttatatttttcttcttggaaaagtatctagttaattttgtattttaaagttcttaacctcatcccaagaacttctgcctttataatcatttctctcttcatatttattttatacaagatagatggttgattatattgttgctgtctttacagatggagaattaaggaataaaaaggacagacagactagattacctcaaacactgaaatgctatgatttgtcccaagccatacactcattatctgaccaggcatatggtgctttttctgtagaagcattttgtcattatgaaaaaaattatgtcttctgtatttaccttaatgaagctgacaactttcagaggttttcagtggtgaagagaaacttggataaggagataacttacacaaacagaaaaagcctcatctcttctggattcctttaatgccagtagtcatcaccaggtacaggttaaccacccttcaccagagctgggacctccaccttctcatctacaggtatatcaccttaaaaatcttctgcgtttcactgtcactcaacacattttctccttccaaggctctgcagtctcatgagtttgtctctatttttcttcttataacttaccttcctaccctagccagcctggatctcatagaagattaactgaaatactcccaacattgggtcattcctgtgcccctgttttcctgctgtaccctggtaaaatgccaacctaatccacagtctattgttctacttctgtatgtgagggctaaagaaaaatcaaccagtcatacagattaactctgttttaaagtaactattaatgctgggtgtgatggctcagacctgtaatcccagcactttgggagggcaaggcaggcagatcatgaggtcaggagtttgagaccagcctggccaacatggtgaaatcccgtctccacgaaaaatacaaaagttagctgggtatggtggctgatgcctgtaatcccagctactcaggaggctgaggcaggaaaaccacttgaacctgggagacagaggttgcagtgagccaagatcacaccactgcactccagcctgggtgacagagtgagattccatctcaaaataaataagtaaataaataaataaataaataaagtaactattaaatattttcaacctcatctgagtacttagtcttgcctgatgccttttgcttgcccaacactgttggcaagcaattctcattttcttcaagaattttaccaaatcttttccttctccctcttgacattcctgtcgcttcacctgatacagaggttcttaactcctacctcattgattttttttttagacagagtcttgctctgttgcccaggctggagtgcagtggcacaaccttggctcactgcaagctctgcctcctgggttcatgccactctcctgcctcagcctcccaagcagctgggactacaggcagccatcaccatgcctggctaattttttgtatttttagtacagacatggtctcaccgtgttagccaggattgtcttgatctcctgacctcgtaatctgcctgcctcagcctcccaaagtgcagggattacaggcgtgagccaccatgcctggccctcattgagatttttaaggtttttgcttttttctataaattgacctataggagtgagaggtgaagccaactggacttcctgggtcaagtggggacttggggaacttttctgtcttacaagaggattgtaaaatgcaccaatcaggaactttcctgtcttacaagaagattgtaaaatgcaccaatcagtgctctgtaaaacacaccaatcagcactctgtaaaatgcaccaatcagcactctgtaaaacccactaatcagcaggattctaaaagtagccaatcacggagaggatgagaaaagggcactttgataggacagaaatgaaacatgggaggggccaataagggaataaaagctggctgcccaagccagcagcagcaacctgcttgggtccccttccatgctgtggaagcttttcctttcactcttcacaataaaccctgctaccactcactccttgggtccatgccatctttaagaggtgtaacactcaccgtgaaggtctgtggctccattcttgaagtcagcgagaccatgaacccactggcaggaaccaactctggacacatcttgggggctcatccaggatatcaccacatggtgagtaccatcagaccccttttgcttgctattctgtcctatttttccttagaatttgggggctaaacaccaggcacctgtcagccagttaaaagcaaccagcacagccaccaggctaaagacacaggtgtcaggctttctgggaaaaggctctctaacaaacctgactcttcagagttgggagcattgatttgcctggaaccagcttccacttttcctgcacttccaggctgagccaagggtcaacagagaggaaagccattcagctctgaggtcctgacaaaaagttggttgacccttcagccatgagcagaactcatagttacatcggccgagtgagacttgccgatctatactatctatcctgacccttgcctcctgggtcctaatgcctgtcagacaaacttcctcccacctcttctctgaggctagtcctgattctaaaaacctctccttgtctctggtgctcttctagtatctcctataaggatgatttctaatataaactttgggactctgttcccttctttaggcacccaggctcaccaatcagaaagatataatttttgcccaaagccctgttaggggggtactagctggaattttaggatccctcctaagactagcaggtctaacaaaggctattcccaaagctatgatattgggagcctcagaaattacagactccaaaataggggggatatcctttctattaatatgatgagaagtgaggacaaaatgtgtcactcttccaaccctggagatcctttccctccctcagggtatggccttctactcaattttgaggcatatcatctttttaagacaagagtaaggtccccataccaacagggaaaaatgctaaggactttaactaacaggttttcaaaaatgcatcagtaagggccactaaatctgaccttccttggtcctctttgtgaactaagaggaaaggcagtgtttctgctgctgcttcagtgagtgtaactgttccaaacagcagggtccagaaaccattgtgggttcttgggtggggaaaaaaaaagaccaaaactgtgggtggctttttctttcatatgggaaatactcaagcatcaacaagctcacccttgacatgcatcctaagccattagacctatttgacctgcaaaccctgaaaaataagcagcttatttttttctgcactatggcctggccccagtattctctctctgatggggaaaactgaccacctgagggaagtataagttacaatgctatcctgcagcttgaccttttctgtaagaaggaaggcaaatggagtgaaataccttatgtccaatctttctttttattgaaggataatccacaactatgcaaagcttgcaatttatattccacaagaggccctttcagctcacctccatatcctagcctccctacagctccccttcctattaatgataagcctcctctaacctcccccacccagaaggaaacaagcaaagaaatctctaagggaccacaaaatgccctgggctattggttatgcccccttcaagctgtagagggagggcaatttggcccaacccaggtacatgaccccttatccctctctgttttaaagcagatcaaggtagacctgggaaagttttcagatgatcctgataggtatatagatgtcctacagggtctagggcaaaccttcaacctcacttggagagatgtcatgctattgttagatcgaaccctggccttgaatgaaaagaatgtggatttagctgcagcctgagagtttggagatacctggtatcttaatcaagtaaatgatagaatgacagccaaataaaatgacaaattccctactggttaacaagctgtccccagtatggatccccacagggacctagactcagaccatggggactggagttgcaaacatctgttgacctgtcttctagaaggactaagaagagttaagaaaaagcccatgaaatattgaatgacatccaccataactcagggaaaggaagaaaatcctactgccttcctcaaatggccatgggaggccttaagaaaatatattcccctgtcacctgactcccttgaggtttaattgatcctaaaagataagtttattacccaatcagccaaagatatcaggagaaagttccaaaagccagccctggaccctgaacaaaatttggaggcattattaaacctggcaacctcagtgttctataacagggaccaagaggaacaggccgaaaaggaaaagtgagataagagaaagaaaacaaacaaaccttggtggttcagagaggacagaaaatggaacagaccaatcacccagtagggcttgttatcagtgtggtttgcaaggacaccttaaaaaagattgtccagtgagaaacaagccaccccatcgcccatgtccactatgccaaggtaatcactggaaggtgcactgcacctgaggacaaagtttctctgggccagcagcccctaaccagatgatacaacaacagaactgagggtgcctggggcaagtgccagctcatgtcatcactctcactgagccccaggtaagtttaaccattgagggccagaaaattgacttcctcctggatactggtgtggctttctcagtgttaatctcctgcctcagatggctgtccccaatgtccattaccatccaaggaatcctggggcagcctgtaaccaggtatttctcccacctcctcagttgcaattgggagatttagctcttttcacatgcctttcttgttatgcctgaaagtcccacacccttattagggagtgacatattagtgaaagctggagctattatctatatgaatatggggaacaagttacctatttattgtcccctacttgaggagggaatcaccctgaagtatgggcattggaaggacaagtcagatgggcaaaaattgcccacccagtccaaatcaggccaaaacaccccaccacttttccttgtcaaaggcaatatcccttaaggcctggagcccataaaggcttacaggagattattagacatttaaagttcaaggcttagtaagaaaatgcagcagtccctgcaacaccctaattctaggaatacaaatactgaatggtcagtggagactagtgcaagatctcagactcatcaatgaggcagtaattcctctatatccagttgtaccaaacccctatatcctgctctttcaaataccagaggaagcagaatggttcaccattctggacctcaaggatgccttcttctgcattcccctgcactctgattcccagtttctctttgcctttggggatcccagaccacacgtcccaactcatggggatggtcctgccctaagggtttagggatagccctcatctgtttggtcaggcactggcccaagatctaggccacttcttaagtccaggcactctggtccttcagtatgtggataatttacttttggctaccagttcagaagcctcatgccagcaggctgctctagatctcttgaactttctagctaatcaagggtacaaggcatctaaactgaaggcccagctctgcctacaacaagtcaaatatgcaggccaaatcttagccagaggaaccagggccctcagcaaagaatgaatacagcctatactggcttgtcctcaccctaagacattaaaacagttgtggaggttccttgggatcactggcttttactgactgtggatccctagatataatgagatggccaggccactctatactctaatcaaggaggcccagagtgcaaatactcacctagcagaaagggaaccagaggcagaaacagccttcaaaaccttaaagcaggccctagtacaagctccagccttaagccttcccacaggacaaaacttctcttcatacatcacagagagagcaggaatagctcttggagtccttactcagactcatgagacaactccacaaccagtggcatacctaagtaaggaaattgatgcagtagcaaaaggctggcctcactgtttacgggtatgtaaatggcatactaggttccaaaggaaatttatggagatcagacaactgcctgcttagatagcaggtgctactccttgagggactggttcttcaaatactcatgtgtgcagccctcaaccctgctactttactcccagaggaaggggaaccaatcaagtatgactgcccacaaattgtagcccagacttatgccaccagagacgatctctaagaagtccccttagctaatcctgaccttaacctgtaccctgatggaagttcatttgtggagaatgggatgcaaagggcaggttatgccatagttagtgatgtaacagtacttgaaagtaagcctcttcccccagggaccagcactcagttagcagaattaatggcacttacccaggccttagaactgggaaaggaaaaagaataaatgtgtatacaaataggaattatgcttatctaatcctacatgcccatgctgcaatatggaaagaaagggagttcctaacctctgggggaagctctattaaataccacaaggaaatcatggagttattgcacacagtgcaaaaacccaaggaggtggcagtcttacccagccaaagccatcaaaaagataaaggagaaaaggcagaaggaaacagttgggcagatgctaaggccaaaattgctgccaggtggaacctcccattagaaatacctatggaaggacacttggtatggaacaatcctcttcaagagattaaggcccagcattccctggccaaaacagaatggggactttcacaagggcatagttttctctcctcagggtggttaatgatagaagtgggaaaggtactcatacctgaagacagccagtggaaaatacttgagaccctccaccaaacttttcatatgggtattgagaacactcattaaatggccaaatccctatttacagggccaaatctcctccagaccatctgacaagtagtcaaagcctgtgaggtgtgccaagggaataatcccttggtccatcataaggctcctctgggggaacaaagaatagggcactatcctggagaggactggcagttagacttcacccatatgcctaagtcaaggggatttcaatacttgttggtcggtgttgatacctttataaattggatagaagccttcccctgcaagacagagaaggctcaggaagtggttaaagtcctaattcacgaaataattcctagatttgggcttccccaaagctcacaaagtgacaatggtccagcttttaaagccacagtaactcagggaatttattggtcaagtccttcccctctacctccccttctatggattccttgtgggaaggaccatactcggtaatggtctctaccccactgtagttaaggtggcaggagtggaatctcagattcaccacacccaagttaaactttggactccccctgaagaaccttcaggaccatcagttcagatcccaagatcagccagaccagcctcgatacacctgtgaaccactggaggacttgcctctcctatttcagaaggaaacatcccagactaaaaaggctcctacacctgatcctgaggaaaaaccccttcctacttaaaagagataaatgaaaacctacataaatctttttttatcttttaatttttttattatactttaagttctagggtacctgtgcacaacgtgcaggtttcttatatatacatgtgccatgttggtgtgctgcacccattaactcatcatttacattaggtatatctcctaatgctatcccttcaccctccccacaccccacagcaggccccagtgtgtgatgttccgcttcctgtgtccaagtgttctcattgttccattcccacctatgagtgagaatatgcggtgtttggaaaaacctacataaatttttaacacctcaccttgtccctttaatggaatccttttactgtttcatcacattactaagtggcatactaaccatactctttgcagaaggactatatactgtagctcctgcagggacaaaaatcctaatcacatcaaccttttttctatcatccttccttctgacagaaatgtactcctacctttaacttagactagataaaatgatctcatcttccagggcatcctctttaccttcctatttactctttgcctatctatccctcctgcttccttaggtaccccccatagtcacctctccccttccactagctcttaattcctctaagagactctcaaattaaccctctctctgttaaaccagtccaatccttccctggcaaacgactgttggctttgtgtctctctatcagctactgcttacattgccactcccgttcctgcaaaaaactgggtctttattaatttcacctaccaccccccattatgaaggaaaagaccctttccaacttctaaatgtgcaattattagctgacttccccacctctgataggaccaaaaataccctaacaggacatgcaatccagcttttacgctcttacatttccaacctcacctattacatggacactgaaaagcccatacatggccctgtaaccaaaaataccatcttaactttccaagcccctttatgcatctaacgcaacctgttatcaggcctgtccctgggacacctactatctcatcagtgtaattacaccctacaacttcaagccccaactgatgatagtaacttctgagtcacccacacagctccattcagacagcttgtctgcttctcagtgaccccaaaatcatcacctcctccctgcttaataaacagtctgggttttttaatggcaagcatactccctgcatgaccattcacccctggaccccctgcagcagcgcccccaccactaataaatgccttctcatcccctctttcaattactctcttgaatggttcctagtagatacaaaaaggttttttctccaatgggaaaatagaacacagggaaccactctgtttgctccctttccagccgctcaccagagctaccttggcaagtagtctagcagaatgggaaaatgaaaacaacaaactcacacacctttttaacacacacaaccagttctgtctacccagccaaggcatattcttcttatgtgggacttcaacctatatctgcctccccaccaactggacaggcacctgcaccttagtcttctgaaatcccaatattgacattgccccaggaaatcagaccctatcagtgcccctcaaagctcaagtctgtcagcacagggccatacaactaatacgtgtacttacagggttaggaatggccactgctacaagaaccagaatagccagttcatctactttattatcctactaccacacactcaaaggatttctcagacagtttgcaagaaataacaaaatctatccttactctacaatcccaaatagattctttggcagcagtggctctccaaaaccactgaggcctagacctcatcactgctgagaaaggaggactgtgcaccttcttaggggaagagtgctgtttttacactaactagtcagggctagtataagatgccacctggcatttacaggaaaagtcttctgaaatcagacaacacctttcaaactcttctactaacctccggagttgggcgacatggcttctcccttttctaggtcccatgacagccatcttgctgttactcatcttggggccctgtatttttaacctccttgtcaaatttgtttcctccaggaatcgaggccatcaagctacagatggtcttacaaatggaaccccaaatgagctcagctcacatcttctgccaaggacccctggaccgacccactggccttttgactggcctagagagttcccctctggagggcactacaactgcagggccccttctttacccctatccagcaagaagtaggtagagtggtcattgcccagttcccaacagcagttgggatgtcctgtttagaagagggattgagaggtgaagccaactagactttctgggtccagtggggggacttggagaactttttggtcttacaagaggattggaaaacacaccaatcagggacttccctgtcttacaagaggattgtaaaatgcaccaatcagtgctctgtaaaatgcatcaattagtgctctgtaaaacccacaactcagcaggattctaaaagtagccaatcgcagggaggatttaaaaaaggacactctgataggacagaaacagaacatgagagggaccaacaagggaataaaggcttgtcaccccagccagcagcagcaacccactcaggtccccttccacactgtggaagctttgtcctttcgctcttcacaataaaccctgctactgctcactctttgggtccgtgccatctttaagagctgtaacactcaccgcaaacgtctgcagctccattcttgaagtcagcgagacaacaaacccaccagcaggaaccaactccggacacaggagtatccttacccctttctgatagattttaggggatggagtatttgtcctgagaaggccaatacatccatctgacacttgtctctatccccatttcctatgtaagtatttgactcttcagccatccagtacactggctctgtctttctggtttacacccgctatccctgtgtcagcactcatttctgctttagcccattaacttcctttctcacaactctactgaacttgtcaataggcacatcagtgatctcctgcatgcccaggtctcgtggacatttttcttcatgttttttgactgctgctctgcctcacttgatattacaatctcctttccttgaaaccctaggctacggtagcactacactttactggttttccattacctttcttacttctcctttgttttttttccagagtccctccagatgtggcctaggaatccttttaaacacagtgctccaggcagaaattagttggagttagtttacaagatgcaatttatttgccatccatccttgcatttcagttccattatttgtcctcaacatgactgtctataaaaacactttctccttccctgggatggcagctaacaagacctagcaaagagaaatgggaaattttattcacaatttcacatgggaagcaattggtaagattattttactgccaaggataataaaattaatgagagagttgaagaaagaggcatgaattctgaaattatatagaaccatctaagaggtaaaactgaggtgttttatccataactgtaggctgtgtttgttttcatagaagtactgtctgatttatggacatgccattgattacactagaattacagattgggcacattaagcacaccaacttaaaaatccttgacattttaaaaatacctctggcagggtttcagagtactcatgatatttaaaatagtaccatgatttgttggtttctgaagtataattttgtttagtcacatgtatgataagaacatacagacttcttgctgtgggcgttggctcatgcttataatgcctgtaatccccgctactcaggaggctgagtcaggatgattgcttgaggccaggactttgagaccagcctggacaatatagcaagactgtctctaaaaaaaataacaatcataaaaagattccttggtttgtaggattaatttttttttcatttttctcgcattaatctgccacttttatctaagataccttaagtttctttattccttggattcgtagtgcagtgaaatgattagggcagggttttgaaaccagatacctgggttcaaatactggtgtggactgtatatttgggggcaatggccttaaatcctctgactttccagtgtcttttaaatgagtaaaataagccttactttgtggaatgttgcaaagatgagagaagatgtatgtaaaatgtttacctattacagtgcttgatatgtagtagacaaattctaaaattacactgaaccattttgcccattgtggctttagaatagaaaagcatactcatacattaaattgtgcacctagggccaggagcggtggctcacacctgtaatcccagcactttgggaggccgaggtaggcagatcacgaggtcaagatatcgaggccatcctgaccaacgtaatgaaaccctgtctctactaaaaatacgacaattagccaggcgtggttgtacgtgcctgtagtcccagctactagggaggctgaggcaggggaatcacctgaacttgggaggcggaggttgcagtgagccgaaatggtgccactgcactccagcgtgggcaaccgagtgagactccgtcaaaaaaaaaaaatgtgcacctatagctaagtgactccagccctgtggaacccttcaatgccaaaatggcatgtaggactagatagatgaatgtcacctgaccctgatcgtctattagtactcactgtattttattactattatttggagacagagtctcactctgtcacccaggctgaagtgcagtggcgcaatctcggctcactcactgcaacctctacctcccaggttcaagtgatttttctgcctcagcctcccgagaagctgggattacaggctactgccaccacacccagctaaattttgtatttttagtagagactgggtttcagcatgttggccaggcttgtcttgaattcctgacctcaggtgatccgcctgcctcggccttccaaagtgctgggattacaggcatcagccactgcacccagccaactcgatgtattttaaaatcactcttactggtcattagtcttattacatatcagtataatgaacattttatttattcaagtcctttaattttttttaggtggggataataaaatttcagttgcattccacctgtttcttcatgtgcatatctggatgcacatgtaatttgttggtaccagttttcattgctttactgagcatttgttgagtatctatgatgtggaaagtattgtgccgggtgctggagacagagaagttgagtaaagcatagtgtcatcatccctgtcttcagtgagctcagccaggtggggtggggagcagaaaagaaatgtgaatcgatagttccagggcaaagtaataagtgctttattatgatatgcaaaggtttgtgcgtaccctagaggagcacatgaaagggagtcattaacttgctgaagcttctgaaagggctttagagaagtcgaacatctgatctggttcttgagtaatgagtaggtgttcaccaagtagaggttaaagaaagattgaaaagttgaaactcaaacctcatgaccatgcctccctgtcttctcttctcaaatccatatcattcctgatacattattaaatggatctattttgaaacgtcatgcatttactcccagtccaaaccctctcccaggttataggcctcactcatgcatctgaagaggacacacagggcaaaagaaagagagcagtgggtgggggggctctgagggtcacattggtcaaccaagggtgccattctttttccttacaaatcagatttactgaggtagaatgtacttacagtaaaaatgtatccattttaagtttatagtttggtacattttaacaaacgtatagactctttgccaccacagtgaagatagagaacatttctatcaccccaaaaaaattccttatgccccttttgagtcagtccccatcccccagtcccgggcaggtgctcactggctttctatcactatagattagttttaccttttccagaattttatacaaatgaattcatacagtttgcacttatttcacctagcatagtgtttctaagactcattctttttcttaaatgtcagtcattgatttctttctacagtggaataatttctattgtatgatatatcacaatttccttatccattcaccattgggttgttttctggttttggctattacaaataaaaccattatgaacattcatacacaaaactttgtgtggccatatgttgtcattcctcttgagtaaatactaggggttgtattgttgagttgtatggtaagtatgtgtttcactttataagaaagtgtcaaacttttccaaagtggtttatcatttttgcattcctgtcagtcgtgtgtgagagttcaaattgctttaagtccttgccaacacacccttctattgtagccattttagtagaagtgtaatggtttttattgtggttttgctttgtatttctctaaggactggtgatgttaagccttccttcaagtgtttattagccattcatgtatcttcttttttactattcacaactcacagattgttgtgacatttttgtatcttctttagtaagtggtctgttcaagtcttttgcccatttttatggggctgtttctattgggttataagggttctttctgtactctggacataaggcgtttgtcatataaaggttttgcaagtattttctttgagcttgtgacttgcttttcattgccatatggtgactttcaaaagaacagaatttttcattttgatgaagtctagttgatcagtgttttcttttatgtttcatttatgtttggcctatttaagaaatcttggctatcctaaggtcacaaatattttgtcttatgttttctctgagaagttttagttttagcttgttttttgtttgtttgttgatttttaaacccacagccaccatcatacagttttagctttaacgttttggcttatgatccactttggcttcacttttgtttttggtattagttaaggatcagggttcattctttttttttttttccacatgaatatactgttatttcagtaccatttgttgaaaagactctcctttcctccattgaatcatgttgacatctttgttgagaattaatggaacacatgttagtttatttctgaactttgttctgttccattgacctataggtctatccttacaccagttgcaccctgtttggattactgtagctttatagtaagtttcgaaatgaggtagtgtgtaagtcttccaaatttgttctgtaccttcaaagttattttgactcctctgggtcctttgcattttcatataaattttaatatccgattgtttagaagcctgttgaaattttaaataagattacatttaatctagagatccatttggggagacttgccatcttaataacagcaaaccttccaattcagaaacagcatattttaaaaatttgtttaggtctcctttaatttctctcagtaggagtttatagttttcagtgtaaaggtcttatacaaattatgttacatttatctttaaatattttctatttgggaatgtgattataaatggaatgttaagagttttaattctccaactgtttttgtaagtatagaaatacagttgattgctgtgagaggtgaagctggctgggcttctcagtcaggtggggacttggagaacttttctgtctagctaaaggattgtaaacgcaccaatcagcgctctgtgtctagctaaaggtttgtaaacacaccaatcagcactctgtaaaaatgcaccaatcagcgctctgtgtctagctaaaggtttgtaaaccaatcagcactctgtaaaaatggaccaatcagtactctgtaaaacagaccaatcagcactctgtaaaatggaccaatcagtaggacatgaccaatcagtaggacgtgggcagggccaaataagggaataaaagctggccacccgaaccagcaggggcaacctgcttgggtcctattccaggctgtggaagctttgttgtttagttcttcacaacaaatcttgctgctgctatctctttgggtccgcactacctttatgagctgtaacactcactgcgaaggtctacagcttcacttctgaaggcagcaagaccacgaagccaccagaaggaaaaaactcccgacacatcttaacatctgaaggaacaaactccagacacaccgtctttaagaactgtaacactcaccacgagggtccgcagcttcattcttgaagtcaacaacaccaagaattcaccagaaggaaccaattccggacacacctgtgtgtaattttttatcatgagaccttgccaaatttacttagcattaggttggtgcaaaagtaattgcgtttttttgctttttttttttttttttttttttttttaagcaatggcaaaaaccataattattttcacaccaacctaatagttttaatagcttcttggtaaatcccttaggattttctatgtatccaatcatgttatttaaaaacgcacttttatttcttttctttccaatctgtttccctttatcctctccctcactcctcctcccttattgcactggccatggcctctaacacaatactgaacaaaagtggtgaatgcaaaacattcttgccttgttttgtgtcttagcaggaaagcatttaatattttaccaataaacttgatattaactgtaagatttttgtacatggtcttaatcagtttgaggaagaacttttccctttgttttgttttgtttttgctgaaacctgtttattgttgattgttttatcttttaatttcaaattttaggcacaataattgtaaaaaaaaaaaaaacagatttttcacatatgcctcatccacctttcccaatgtcagtgtcttacctaacgctagtacaaatatcaattagcaaattaacatgctgtgtacaaggtattggtccagatgttaaatgtatgtatgaaatctgattttgaagactaaagtggatattaatataaacaattattttttgctttgcaaaataaattccagatgaaattccttttaatcaaatttttatgttgtatgtaatcaaagtatttggcaagcatctcttgttgagaaacaagattcagagagagtagaggtaggccaaggtctcataactatttagtagtagagccctcactaaatgcatatttcctaaccaattcccacatcaccagccttctctgtgattttcttctttaaatattgattggcattgtattttgctttcattgaatttgtacttcattatatttgtgttttattttcattgtataaccaccatggcataatgttattgagaactgaaagatcagttactctgtctttttaaaaaatgtttaaaatgaaataataatctgtacatggttgtggtcccagctacttgggaggctgaggtggaaacatcttttgagcccaggagttgaaggttgcagtgagctatgaccatgccaccgcactccagcctggggtgacagaaggtgatcctgtttctaaaaaaaataaaaataaggccgggcatggtggctcatgcctgtaatcccagcactttgacaggccaaggtgggtggaccatttgaggtgggaagtttgagaccagcctggccaacaaggtgaaaccccatctctactaaaaaatacaaaaattggcaaggtgcagtggctcatgcctgtaatcccagcactttgggaggctgaggtgggcagatcatctaaggtcggaagtttagaccagcctgaccaacatggagagaccctgtctctactaaaaatacaaaattagccagttgtagtggtgcatacctgtaatcccagctactcagaaagctcaagaggcaggagaatcacttgaacctgggaggcagaggttgtggtgagccaagatcatgccattgcactccagcctgggcaacaagtgtgaaactctatctcaaaagaaaaaaaaaattaggtgggcatggtggtgcgcacctgtaattccagctactcaagagacagaggtagaagaatcacctgaacccaggagaggaaggttgcagtgagctgagatcgcaccactgcactctagcctgggcaacagagcaagacactgttcaaaataattaaatatatatatatatatatatatatatatatatatatatatatatataaactgggataataggctgggcacagtggctcacgcctgtaatctcaacattttgggaggccgaggtgggtggatcacctgagaacgggaattcaagaccagcctggccaagatgggaaaccccatctctactaaaaaaaaaaaaattagccaagccccatgctcagtgcctgtaatcccagctactagggaagctgaggcaggagaattgcttgaacccgggaggtggacattgcagtgagccaattgaccaggctcgtctcgaacttctgacctcaggtgatccacccaccttggcctcccaaagtgctggcattacaggcatgagcccagcctattatttatttttaattatacattaagttctgggatacatgtgcagaacgtgcatggttgttacataggtataactgtgccatggtggtttgctgcacctagcaacctgtcatctaggttttaagccctgcatgcattaggtttttgtcctaatgctatccctccccttgcccacaaccccccaacaggccctggtgtgtgatgtttccctccctgtgtccatgtgttctcattgttcacctcccacttatgagtgagaacatgtggtgtttggatttctattcctgtgttagtttgctgagaatgatggtttccagcttcatccacgtccctgaaaagaacatgaactcattcttttttatgtctgcattgtattccatggtgtatatgtgccacgttttctttatccagtctatcactgatgggcatttgagttcgttccaagtctttgctgttgtaaatagtgctgcaataaacatacatgtgcatgtgtctttacagtagaatgatttataattctgtgggtatatacccagtaatgggattgctgggtcaaatggtatttctgattttagatccttgaggaatcaccacactgtcttccacaatggttgaactaatttacactcccaccaacagtataaaagcattcctatttctccacatcctctccagcatctgttgtttcctttttaatgattgccattctaactggcatgagatggaatctcattgtggttttgatttgcattcctctaatgaccagttatgatgagctttttttcatgtttgtttgccacataaatgtcttcttttgagaagtgtctgttcatatcctttgcccaatttttgatggtttttttttcttgtaaatttgtttaagttccttgtagattctggatattagacctttgtcagatggataaattgcaaaaattttctcccattctgtaggttgcctgttcaccctgatgatagtttctttggctgtgcagaagcactttagtttgtttgttttaatatttgtgtaataatgtccagttttaccaagcagaatgttttacataggagcttttatgcaaaactcattgttcttcacttagagcttgttagtccagagtgaaatcaaatccattttcagttgctacgtggctttgttaaacagaaacttgagttgaggatgctctgctatatggaagaattttcactcccctgatgtgtttgtataatagaatgtatttttcccctttcccctgtgaaaactttatggaaagattatttcagtgttaaccctgactgatattttactaatcaaacaagtgtctgttactcctttattcattaatttatcaagcacttaatgagtgtcttctgtgtgctaggcactgcactagactctggggagtcaaagatgaatcacacttagtctctaaccactgggaattcattctggttagagaaattataaacaaataattatgatcctatgggatatttttaaagtatgaaatgagataatgtatgtgaaaaaaactttgtaagccttacacatttaagattcttttctccagtggatagcatgatgcctgacatatttttaaatgctcattatacctttaaatgaactggtaaagagccaagagttatgagagcataatactagagtgtagtagatggatttgttctgccttggtggacaggtgggatgtggagatttccaagaatataacttttgaactggacttggaaatataatttgtttaagaatcgagaaaggaggttctgcgggggcagctatcagtcgttaaactgcctggatttagatgaaccacgtatctataggcttttacagtttacaggatgcttttgtttacagtatctcttttgagccttatgacaggtccatgaggtgagttcatacaaccaagagaagccttgaccagaacctgggttctcaggtgtaagagacagcatctggccagtttattctttacagtttcatggatgttatgattgctaatattattgtatttctattattatatttgtgaaagcatggttttttgagttacaagtatgtgaaagaaaaatgtatacatgtcatgaaatgtatagttttctttttatttctctaaagaagtttagcttgtattaatacatgaggagtttttttccagaggtttcagaaacaagttagaaaatgcttccataatatttcatagattatttaagattcaagcagtttttcaggatttaaaccatttaaaccatttatctaatgaacagtaagtagtaactctgagctctacattctcttgtaagctttctttttctgttatagttgagcacatttgttgacatttttattttttacaccaaaatgtttggttaaaatactttggggagaaaaataaagaacttttttctcatttatagttgacttcctattttgtgtatattgtcttctgtatgtattaagacagtgaagtattggtgaaagaccaggtaaatagatcaatggaacagaataggcaccccagaaatagacctatacaaatagagtcagctgatctttggcagaggagcaaaggcaatttaatggagaaaaaattgtcttttcaacaaatggtgctggaacaactagacaaccacatgtggaataatgaatatagacactgaccttacacctttcccaataattaactcaaaacaggtcatagacttaaatgaaaaacaaaaaactagaaaatttctaggagtttaataacataggggaaaatctaggtgaccttgggtttggcaatgagattttagatacaacacaaaaacaccatctacaaaagagaaaatggacaagattgacttcattaaagtaaaacatgtctgctgtgccagtgacactgttaagaatgaacagacaggtgggcacggtggctcacacctgtaatcccaacactttgggaggccaaggtgggcagatcacaaggtcaggagttcaagaccagcctggccaacatggtgaaactcatctctactaaaaatacataaattagctgggcatggtggccagcacctgtaatcccagctacgcaggaggctgaggcaggagaaatgtttgaaccctggaggtggaggtttcagtgagccaagattacaccactatacaccagcctgggtgacagggtgagactccatctcaagaaaacaaaacaaaacaaaacaaacaaacaaaaaaactaaatatggtcttaccatacattctagcagtcatgctcctagtgattttcctaaatgagttgaaaacttatgtctacacaaaaacctgtatattaacactttacagaagcttcattcataattgccaaaagttggaagcaatcaagatgtccttaaataagtgaatggataaacaaatggtggtacatccatgcagtggaatattattcagccatactaagaaataagctatcaagcccagaaaagatgtggggacactttaaatgcataaaagcagccagtctatgaaggctacatgttgtataattttaactatatgacattctggaaaagaaaaaactatagagacagaaaaaagatcagcaattcttgggttgaggatgggaaagggaggaaaaacgaataggtgaatcacaggctacttagggcagtaaaactcttctgtatgatactgcaaggatggatccatgacaaaacccccaccatcgtgcaatgcaaagagtcaactctaaagcatggcatttagttagtaatttatgggtactgggtgatcagttgtaacacatgtgccacactaaggcaagaggtaatcacaggtgaaggagaaggggtatacagtgtgtaccttctactgaatatttctatgtgactaaaactgttccaaaaataattatttttgtttttaaaaaagtaaaaagtgattttccagtatctcactgctaatggcttagcctttttttttattctttccttgaactgagtaggaatctgagtctgtcagttgcttcactttctgtctcccagtaacttgctgtgattatgaaaatgtttgtgctaaacaacccatgaacaaagcaaataaagatattccttcatctacccagactgaaaggaaatatgccaccacatcaatgttaatggaagagagattacagctggtttctcctttcatctttgttttcctgtattttccaaatgttctctgtaaaataaaaagctcttagcactaaaacagtatatatgtattccactgcagcttaattgtattcagttaacataattgaagagattaaataagaaatgtagaaataagtaagacatagatcttaaggatctctctggttaactgtaagtgaaagactatctcaccacaatgcttgatgtaaacggtctgattggtgagtgacaacatcatcaattattgcagcttgcaaagggattgatttttaaatttttacttattaattatatacttgcttatttgttttctcatttacttgctttcttatttgcttattatttactcactttcctattgctttaaaagaggattctaattagatattatctaagtgattaggccgagttcttacattttgttggtttaaattactttaagatatatgtttgaaatcacatgtttactcttcaaatgtgtgccatttgcagtgtgtgtgttgggggaaatgagttattttttgatgggaaatgagttattttttaaaaagagaattatttagatatggctttagtgattccttagcacgataactggtgatgaaatgtagcttattgttttcagctagtttacattggtcttgagacaaacagatatttgtttcttaattacaggctctagatgactttatagaacacctcagggctgttatcaagtacttacatacgaaggataactccatttgattatatattttataccccaaaggaaaataagtttaaatttaattttaaccagatgatgccatctgtatggagtcactctgtcattgtgtccatactggccaggatgcattttaatgaatagtgtttgtttatttggtcttagccaaatgagcaaggacctggagactgggaaatttgagaagacatttaggaatcactggcttttctctgttgatgccactatgtaaactaacgatgacggggtagagaagatgtgtggaattcctgtgtgattcactgtaactgtagtgtgctaaatgcatggttaagctagtgtcagcatcgtcttcctataaattacagatcccttctgtgagcagaactgcagatgttgtattttgaaatctgctttagaggatattttaagacttttaataaaagaaagatgactaatgtacaaggggactcaaggggaagaaaaaccccttcctctatagggtagcatatttgggattataatttttgttttctttagcttggtttcattttcaagtgaatccagaaaacactatttactttgacaatattgctataaaattaccataatatgaggatacgttgtcaatctcaaatatataaaatgaccaatgtcagcgagcatttatccttttaagaaaatctattctatgaaaatccaattttgtgcaaaaagtgggaaataaatggaggcataactgtttgctctacaagacttgatttgattcatgtaaatagaaaatggttttattacatgtaaaatatgatttaaattggtcaaaatgtcattttcagaaaagcataccttttaagccagcactcattacatagaacaaggattctatctgtgtgccacaaacaacttcaaggaattttctttgtatgtaatgacataggaagtttttccttagcgttcatctcaactacggttcctcaggaatattgtctttgagtacaaattataatgggtttattttctaactaaagtagagtagtcaggctagtttattagctagtttagttctgacctctatggttgagaacagatacaacagaaatgctattatatcttcagatcttatagaaaacagatagcggaaatgatgaagtgtacctggctggctttctgacaatttgtgtgaaatgcttggctttgtaattttacatttctttgtagtctgatgccttgagtttatttatgtagaaacgtatttccacagactgcttatctgatttttacatgctgcttcacagttgtatactacttaaggtatgtagctttatacttaatctaaattggaattgggtttttgtgttattgtcatttggtacattggtcaacactttataaatgtttaactttttgttttgagttaattatagatttgcatgtagttgtaagaaataatagagagacgccaggtgtggtagctcatgcctgtgattccagttacctgggaagatgaggcaggaggatcccttgaagcccaggagttcaaagatgcagtgagctgtgatggtcccactgcactccagcctgggtgacagtgagaccccatctgtacaaagaaaaacaaataatacaaaaaaatctcatgtacgggtctactaaattttattgtgttttgctttattgcgctttgcagatattattttttacaaactgaaggttggtggcaacgccgtgtcaagcaagtcttgcagtgctgtttttctaacagcatatgctcacttcgtgtctctgtgctacatttcggtaacagtgttttagatgttttcattattatcatatctgttatatagcgatcagtgattgttgatgttactattgtaattgtttacaacctcgctgatagaaaatttttgtgtatgtgtctttttgttttgtattcttttgttttgttttgttttgttttgttttgttttgtttttgagacagggtctttctctgtcacccaggctggagtgcagtagcataatctcagctcactgcaaccaccaccttcccggctcaagcgatcctcccacctcagcctcctgaataactgggacagcaagtgcatgccaccacactcagctaatttttaaattttttgtagagaagaggtctcattatatgcccaagctagtctccaactcctggactcaagcaatcctcccacctcggcctcccaaaagtgttgggattacaggcatgagccaccgcaccttcccagttgtgtgtgttctcactgtgtcattcaccatccattctcagctcgctcattctcctcaggcctctctattacctgacacagaacagtattgaaattaggctaattaataaccttgcagtagcctgtgagtgttcaagtgaaaggaataattgcatgattctcactttcgatcaaaaggcagaaacgactaccttcagtgaagaaagcataccgaaagccgacctaagctgaaagctaggcctcttgtgcccgttagccaagctgtgaaaacaaagggaaagttcttgaaggaaattcaaagtgccacttcagtgaatacacaaatgatgaaaaagcaaaacagacttattgctgatacagagaaagttttagcagtctggatagaagatcaaaccacccacaacattcccttaaggcaaagcctaatccagggcaaggccctagctcgcttcagtgctatgaaagctgagagaggtgaggaagccactgaagaaaagtttgaagctaacagaggttggttcatggggtttaaggaaagaagtcatttctataatataaaattgtgaggttggctgggcgtggtggctcacgtctgcaattacagcactttgggaggctgaggtggggggatcatgaggtcaggagttcaagaccagcctggccaacatggtgaaactccgtctctactaaaaatacaaaaattagaccaggcaaagtggctcatgcctgtaatctcagcactttgggaggctgaggcgggtggatcacctgaggtcaggagtttaagaccagcctgggcaacacggtgaaacaccatctctactaaaaatacaaaaattagctgggtgcagtggcatgtgcctgtaatcccagctacttgggaggctgaggcagaagaatcgtttgagcctgggaggcagagtttgcagtgagccaagattgtgccattgcattccagccttggtgacagagcgagactctgcctcaaaataaataaataaatgaataaataaaaagtgcaagtttgaagcagcaagtgctgatgtagaagctgcagcaagttattcagaagatctagctaagatcattgataaaggcaggtccactaagcaacagatgttcaatgtagaagaaacagccttttgatggaagaagatgccatttaggactttcctcctagagagcagaagtcagtgcctggcttcaaagcttcaaaggacagctgactgtcttcttaggggctaggatagctggtgactttaaattgaagccattgtttgtttaccatcccagaaatgctagggcccttaagaattatgttcaatctactctgcctgtgctctgtaaatttaacaacaaagcctggaagatatctgtttacagtataatttactgaatattttaagtccactgtggaaacctactgctcagaaaaaataattatttcaaaatattacttctttttgacaatgcacctggttcctcaagagctctgatggagatgtacaaggagaggaacattgttttcacgcctgccaacacaacatgcattctgaagcccatggttcaaggagggattttgactttcaagacttattagttaagaaatacattttgtaaggctaaagctgccatagatagtgattcttgtgatggatctgtgcaaagtaaattgagagccttgtggaaaggagtcaccattctagatgccattaagaacattcatgagcaggtcagaatagcaacattaacaggagtttggaagaattgattccaaccacccaggatgactttaaggggttcaagccttcaatggagaaagtaacagcagatgtggcagaactcgcaagagaactagaattagaagtggagcctgaagatgtgaccaaattgcagcaatccatgataaaatgtgaacaggtgaggagttgattttaatagataagcaaaggaagtggtttcttgagatggattctactggtgaagacgctgtaaacattgttgaaatgacaacaaaggattcagaattgtgtagaaacttagttgataaagcagcagaggggtttgagaagattgaccccaattctgaaagaagctctactgggggcaaaatgctaccaaacagcatcacttgttatagagaaatctcttctctaggccccagttttttctaagtgaagagaattttagaatcaatctcatagaagtgttgggaggatgaagttaaaacaagcaacacatttaggataggatgtggcttataacaagctctccatgaatattagctatcatcattcttaagaaaattaccaaattaatagattttctgctccttcacacttaatttagtagtttttttcatttattttgtcttcattaaagcagttggcacaaaattagtttgttgatctgcaatagattttttttttttttttttgagatggagtgtctctctgttgcccaggctggagtgcagtggcaccatctcacctcactgcaacctccacctcccgagttcaagcaattctcctgcctcagcctccccagtagctaggactacaggcacccaataccatgcccagctaatttttgtatttttagtagagacagggtttcaccatgttggccaggctggtctcgaacacttgatctcatgtgatccacctgccttggcctcccaaagtgctggcattacagggcatgagccaccacactgggccaattgacatgtatttaatagttattctcctagcaatcattattttgtattttctgtcttagcataaacaagtttcagtcttactgatgtgtgttaagctgttcccccatttatacttcagctggtttgtggtttttaataatgtagatacaaatgtgaggaatatttatatgtacataacttttcacttttaaaaagttgtgataggctgggtgcggtggctcatgcttgtaatcctagcactatgggaggccgaggcgggcggattgcctgagttaaggagttcgagaccagcctgtgcaacatggtgaaaccccttctctattaaaatacaaaaaaaattagcgaggtgtgggggcatgcacatgtagttccagctgatcaggaggctgaggtaaaagaatagcttgaatctgggaggcagaggttgcagtaaaccaggatcgcgccactgcaccccagcctgggagacagagcgagactccatctctaaaaaaaaaaaaaaaaaattgtgataaggtctggcacagtggctcatgcactttggcaggctgaggcagccggatcacctgagttcaggagtttgaaaccagcctagccaacatggtgaaaccctgtctctactaagaaaaatataaaacttagccaggcctggtggcaggtgcctgtaatcccacctactcaggaggctgaggcaccagaattgctcgaaccctggaggcagacattgcagtgagtcaagactgtgctgctgcactccagcctgggcaacatagcaagactgtctcaaaaaaaaaaaaagttgtgatataaaatatacattaacataaaatttatctttataaccattttgaagtgtacaattcagcggcaccaagtacattgacaatgttgtgtactcaccaccactatttatttgaaaatcttttcttcgccccacacaaaaacaaactatagccattaaacagtaactcttcacttcccctctccctagctgctactaacctctattttactttgtccctaagaatttgcccattctagatacctcatgtaagtgggatcatacaacattcgtccttttgtggctgtctttatttcacttagcataatgttttcaaggtttcatccatgttaaagcatggatcagagcttgagacagagtctcgctctgtcacccatgctggagtgtgatggcgcaatctcggctcactgcaacctccgcctcccgggttcaagtgattctcctgcctcagcctcctgagtagctggaattacaggcatgtgccgctgcgcctagctaatttttgtatttttagtagagatgggccaggctggtcttgaactcctgacctcagctgatccacatgcctcggtctcccgaagtgatgggattacaggtgtgagccactgctcccagcctattttatgtattttgtacatactgtttagccattgaacttttgatggccagtgagtatgactggggcccatccaggcagggtgtggagcagagggccctcctttatgggctggactcactagtgggctgcttacctgtgactcacctccaaggctcaagttaatgctaacgtgttgatttgctagaactctgagctgtgcctgtgtctccttgggccctgggagatttttttcttttagcagtattttatggagatattgtctaggtagagtaaaatgtacagatcctggttttctgttgagttttgttttgttatgaggcagggtcttgctctgtcacccaacctggagtgcactggtacaatcatagctcactatggcctcaacctcccaggctgaagcaatcttcctgcctcagtctccctgtagctgggactacaggcatgcaccaccatgccccactaatttttttgatttttagtagggatgatgtctcattatgctgcccaggctggtctcgaactcctgggctcaagcaattctcctgcctcagtctcccaaagtgctcaattacaggtgtcagctgctgcacccagcctcagcctgttgttaatggatgtaaacacctgtgtgaccaccacccagaaccagatccagaacatttccaggctctcgaagactccttcgtgcccgtcccagtcagagacccccaagggtaatgccattctggcctgttgttcaacttgacttgaatggaattttcacagcatgtgtctgtttggatctggcttcttctgctcagttgcgaggcccattgatgtttcctgtggcctagctcctttttattgctgagggccactcagttgtatgaaaaccacaattcattctcccttctcctttggtgaacatttgcactgtttccagcctgggacaatgatgagtaaagctgttaaaaacaggcacatatgttttcctttctcttgggtaattttttagaagtagaaaagccagccaatagaagtagatatttgactgtattaaaactcaccaagcagtttttcttattttttttaatttttaaattttttttagccagagtcttgctctattgcccaggctggagtgcagtgtcgtgcactctcatggacacacatggatccagatgccacagcagccttagctggccaaccttaaaacaacacatttgttcttatagtgttggaggtcagaaggctaaaatcaaagtgtcatggaaggtggccagcaggaccgtggagcctctgaggcagtgggacactttggctaagagccacatactggctctggctggcaggcagtcttggccagccaggctgagctccccactgtcggggcaagcctgggtgtcctctggtgatgctgagtccagaacaaggctgcccacattctggtccgcagggctcagctctgctttctagacttccaaataggaagaagagggaaagttcccagtctctgggcacaaccaagaacagagagcaagttctgactcagcagagggattgattcattccatgcaaagagctgcactgccaaggctgacacgagccagggactcagcacacggcatcgcacccagtcctctccagaactctgccacgtagtgttaccatcctgccgttcagaggagggaagtggggcacaggcaggtcaagcaacttggccaatgtctgaattgctagtgtacggagctgggaggggagcccatggggccataaatccagtgcaaaaatccgtcctcctgaaccctacggagcaaaagtgagtccagttgttttcctgggtttcctggacacacagatctgaatttcacagcagccttggctggccaatcttaaaacaacaaatttatactcttaatgattctggaggtcagatgttaaaaggtcaatgtgtcagcaagtttgtttccttctggaggctccaggggaaagaatctgtttcctttccttttgcagcttctagaagctacatgcatgccttggcttatgggccctcctgccatctttaaaactgtcagctttgtccaggcacattgactcatgcctgtaatccaagcactttgggaagccaagacaggaggatctctttagtccaggagttggagaccagtctgggcaagaaagtgagaccgtgtctctacaaaaaaatagaaaaaaattagacgagcatagtggtgcatgcctgtagtcccagctacttgggaggctgaggtggggggaatcacgtgagcctggggaagtggaggctgcagagagctgagatcacaccactgcactccagcttgggtgacagagtgagatcctgtctcaaaaaaaaaaaaaaaaaaacacaaaacaaacaaacaaaaaaccaaaaccagcttcttcttgcttctgttgtcacatctgcaggactcattctcccgcctcccttttataggatccttgtgatcacattgggaccacctgtataatccaggacaatctccccatgccaaaattattgatttaatcacatctacaaagtcccttctacaacgtattcacagtttctggggatttgaatgtggatgtttctggggggtggcccactgataaccagtgttataagtttcttgaaaatccttccagagatattttatctataaataaataaatgcaagtccatagcctccccccacccactttttatacaagtggcatcattccatatcagtgctcagttccatcttcctctttttcttttctttttaaggttacacagaacctattatatggaaataccctaatttatttcacttttttcctgttggaagacttttaagctctttccaatgctttgctttataatcttttgtattataatgctgcaacctatataatcctataaccttgtttgtaggataactttctatttaaaatctcatttttcaggccaggcatggtggttcatacctgaaatcctagccctttgggaggctgagacagaaggatcacttcagcccaggtgttcatgaccagctctggcaacatatcaagaacctgtcttttcaaaaaacttaaaaattagtgaggcatggtggcatgtacctatttggtcccagctattcgggaggctgacgtgggaggctcacttgagcccaggaggtggtggctgcaatgaaccaggatcacacccctcactgcactgcagcctgggcaacagagtgagaaccaatctcaaactaaaataaaataatcttgtttttcagaatttgagggtgccatttaagacattttgacacttcacagaacttttttggggaacttgttgccttggagattagcctgtcctgtcccacccccatgatctgtacttcctgtttctccctcctggcttccttaattaagccttgtgtgtacttgcgagcccatgtccatcacgctctgccttcaattctggatgctgtgctgtgaatacgcttgagtggaggccgcatgctttccaggaaggtgtgtattttcagtgttgtctctcatgatagtatgaaaggctctggagggaatcacaggcctccacaaacaggcaagcggaaaaatgttccacagacatgtttcagggacaacaggcttcccaatcctaggtcgtgctggtccataactggatcaggctgactctccctccccgacaccgctggtgtagacagggacaagaaagagaagtcagagacacaaagaagctgtgatttgcttgaggtcactaaagtacttaatggcagagttcagacctgacctgaggggcaacaaaagacacccccctcaaatccatggggagcagagtctatctgaatcagatcccagattttctggggctttcacgatgccaggtgtgtacactgagctaggatgggtttcccagggttctttgtggtcacacaactcaacaatacagaccagaaagcagtggcgagtaggctgaatttggctggtgggtgttttctgtttggtctgcacagtgtttaacttgttattataggaaattcaaacatgcagagagaattgtaccatcaacaacacacacccatcactctgctccaacaatgatcaattcaggcctatcttgcttcatcctataccctccctcgcttgcttcccttcccaccctcaaatatgtggaagcaaatccagagataccattccattgcaaatatttcattttgtatctctataatatgggaatttggggaatttcatttgagacaggatctcacttggttgcccaggctggagtgcagtggcgtgattgtggcctcaacctcccaggctcaagtgatcctcccacctcagcctcccaaatagctgggattaaaggtgtgtgccacatctggctaatttttttatttttttgtagagatgggggtcccactatgttgcccaggctggctggcctcaaactcctggtctcaagtgattgttttgcctcggcctcccaatgtcctgcaattatagatgtgagccactgtgcccagccaggaactttaacataatcctttttgacaaaaattttcctctaagaaattagaaaattttacagaaaaataaaaatccagacttctgtcttctcttaaaaatttggaagctctgccaatactgggcccagatggcaatcactgattagcactgagtagatgttgacttttcagatgaggggtgtgacgtctactttgccacagtccccaccactcccccacctggccatctcacccatacacatcacctgcctggctcctttaggcatttaatttgtgtaggaaattgacctaaaggagatattagagaagacattaaaaacttgaagaatgtgaaaatcagccaggagatagaactgtgctttaatgagggttatagaaccacactggatatgaagcattttgggaataaactttgaaaattggaagtaccagtttgtgaattttgctcagagagatgaaggtggggggtgggtgacagtggtgaagcatctcctatgtgccagtctcttttaccacaggctgtttctcacaaaatcatcaatcatatgcagtaggagaaacacctttgtattttacggatgagaaaactgaggcacagagaggtgaaataggcttcccgaggtcactcaggtcatatgagcagcagagctaggattcagacctggagttggcctgactctaaaacgatgcatgcctcaccatggcgcattgctcctttaaagagcaccagaagagagaatttgacaaagtggttgcccgtggggcctgggatgggtggggaaactacgctagggctctgggctgctgagggcctgagggaaggaatggggagcccgggcgcagaagtagaggagggggctgccccacggctacagaaggcatctgggaagacactttgctgaaggtggccaggagggcaaaggtcacagtggccattgttatatggtggtggtggggagagggggatggcttcttcttaactttctcgggtgagtcgaaggtttaccctccagacccttgatgggtcccttatgtcccttggacatcctgagtccccagccagggccctgggcgctttgctgggagcttgacataaggtccagcagcccccattgctacctaattccttagcagcccagggtgtctgcctgctacttccctgcctggaaggaaggccttctgcctggtgcgttcctgctgcagcctccactgcctcttagactctcacacaagctcagctccctgtcgcgtcctctcagggccaggcttctctttatcacaagcttagactgtctgagtaactaattggatttgtgtttgcctccacacaggaccctaagacccgtggggctgcgactccctctgtactggtcacagccgcaccctatccccttgcatggcgctgtcaaacccaggctggccactgactagcgctggaggggagcaaacgggaggccggccacctgactgatgttcccacaccttctccctgcaggctgtccccttttctgggactattcaaggaggtctccaggacggacttcagatcactgtcaatgggaccgttctcagctccagtggaaccaggtgtgtgtgtatatggatggaaacgtttcactccagcctcgtcccttagtaaaccactgtgcctgtgagcctgggttagttcaaacagcaacatccaagctcacgtgcctggctcaggggaggcccaatgcgtccctaacccatgccacagggcagcactccacaggcacaacctgcacccaggggtgccattaacctggactccaggatgaatggggccctgggagctgacggtctaaggagggcgtgggatggtcagagttggatgattatgttctgggttgaaccttgcacactgtgactaagagttgcaaaaatcaaacttcctctatttcccgtaactgctctcatccactctgaagctctccttctgctgatgtgaaaatattgaaaattgacattcaaagtaatttggtctctttcagtttcaaggccttttctggaaactactaagtcaattcaacatactaacattgtatcagggctgtttcccaccccctcctccctcccaaggtgggctgtctgggaacagagaagagctcacatggcttctcagtggctgggagggctctagaccctcacgcaggcctggctgacccctgccgaggcaccctgattgggtgacacagaggtgtgcagctctctcctggttgggtgggagaccacagggtggcttgctgaagtctgcggggcccacagaagagcctctggactcatggttctcccacagaagcctctctgcctcagtcccaggggtcctctccttaagaccttctgggccttgcagatcccaactcaacatcagttcggccactagattcttgctgacctcccccaggagatgccaagggcagggaggccctgatccccctgaaccctccaaccaggggaatcaggaccacacccctgatcttcctccccttcctctcttcctctcccttggcctcccctacctcccagcaccaggaaggcttccgactcccatcctgtcgaatagagacagatcctacctcagagggccctctcctctcgggagctttctgtctctcccttccttggggcaggaatttccaaaggactacagggatgaagctgaagggctccaaaagaaaaaaatacattcagaggtatttcaaatgtactcatctccatttattcatttattcatttaattaattattttttttcttttgagacagggacttttttctttgacccaggctggagtgcagtggtacgatcatagctcactgcagcctccaattcctgggctcgagcaatcctcccatctcagcctctggagcagttgggactacaggagtgcactgtgatgccaagctaattaattttttttaaagtagagatgagatctcgctgttgctcaggctggtcttcaactcctgggctcaagtgacccacctgccttggcgtcccaaggtgctgtgattacaggcgtgagccactgcgcccggccccaatttcacatgctctttacatttgttctcttctttcccacttaatcaggcttgtgctagcctccaacaagtgtccactggcatggaaggctctctcttctaggtgtgcttaacaacttccatctttggtaacaattggtaatcactttccaagacctatgcttcttgtttgctaatatcagcacttttccttaagcattttctacttatttttagaaaatcatactgtaaaggcaaaatccaataattgcacaaaaacacattagatccaaattagagaaacaaaaagatgccaaccaagcagtctctgcgacgcaagttgtatgcaagatcccagacaaatgcgaggcagaggcaccgaagccctcctgtgcctgtcactggcaataacccatgccacagaagactatttgctttccctgggcctaggtttgctgtgcgctttcagaccggcttcagtggaaatggcattgccttccacttcaaccttctgtttgaagagggagggtacatggtgtacaacacgaggcagaaaggaagatgggggcctgaggaaaggaagatgcacattccctccagcaggggatgccctttgacctctgcttcctgctacagagctcagatttcaaggtgagcaggaaacccctccccacctctcacccccgggtcccccagctctatcaggcgaatgggctttaagtaatcaccttgattgacattcagccagagtgatgctactatacagataacacaatcatttccttgtaaggtgttattcatggctgcctagtcatcttatgcacctttatctgaatctacaggtgcacctgctgcttcttttactctgaaaataagaactagaggagtcatcacgttgctgtttggtggtgtgtgtctttgaattccaagctcatgccattcctctgctatcaccacacctcctctccaggtgtctggtaacatttattattcagcgacattgttccagccttcatccagggtctattaagggtatagttttgtaagcaaattgcaaattacctttgcaagcagagtaggtctctgggcttcagaagcctgtgggtaagtcagtccgagtatgcttatctgagataaggatgtccccatccactcagtatgcaacctgaggtcacctctcctctgctccccatgagcattttatgcatatataaataatacccctgcagccataaaaaggaacgagatcatgtcctttgcaggaacatggatggagctggaagcctttatcctcaacaaacacaggagcagaaaaccaaacaccacatgttctcacttataagtaggagctgaacgatgagaacacatggacacaaggggggaaacaacacacccttgggcctggtgggggagggagagcatcacgaagattagctaacagatgctgggcttgataccaaggtgatgggttgatctctgcagcaaaccaccatggcacccgtttacctcgttaacaaacctgcacatcctgtactcataccctggaacttaaaatcaaagttgaaggggatgggcacagtgggtcatgcctataatcccagcactttgggaggctgaggagggcagatgacttcaggtcaggagttcaagaccagcctggccaacatggtgaaaccccatctctactaaaaatacaaaaattagctgagtgtggtggtgggcacctgtaatcccagctactcaggaggctgaggcataagaatcacttgaaccactgcactccagcctgggcgacagactgacattccatctcaaaaaaaaattgttcaaggaaaaataaataataaataaatgaaaccccaggtgagctaagactagaaagacaaacctactgcaggaaacaaccagaagaatgaaaagtccaactggagccccgtagagactcgggttgatgcacttcgggtcacacacacgttcctgtaactggccccacactgaagaccagactcaggtcttcattttctagaaagagggtccaggagctcaggggtggtccccatcccagcctgggatgcctcccccggaacacgtgctctcctctggcaggtgatggtgaacgggatcctcttcgtgcagtacttccaccgcgtgcccttccaccgtgtggacaccatctccgtcaatggctctgtgcagctgtcctacatcagcttccaggtcagactgtgcacctggcaccggtcccaggggctgggatgcagggcccagcatagctgtgtctaggcccagctgggtgggcccaagccaatctcctacccaggtcactctggggacaacctctgcttccctgtcccagtacctgcccgccccttctcctctgtcactctgcccctccttctgtgttactgtccctgtccggaacacctgccttggtctcccagactcctcagctgcccctttctcctcaccccttgatttccaccctggttaggaggccatattgttctagaaagaacacaggctaaggaaccaaactgaatccagttcaaattccaagctctgccattcatcctctgtgggatcttagacaagcaacttcacctctctcagcctaggtttcttcatctgtagaatggtcattgcctgccccccatgggtggttgtgtggttcagtgaggagacagatatcagaggtcacacagtggcccccctgggcccacaccagggtctgtttgacctctgtgttttaacaactttgaatgtgttgccaacatctaaaaggtcaggagagtcaggtatggtggtggaggtctgcagtcctggctactcaagaggctgaggcgggagaattgcttgagcccaggaattagagttctgcctgggcaacatagcaagaccctgtctccaaaaaactttgtttaaataataaaataaaataaaacaaataaaactaaagaaggtcaggagataccaataccacgtgaaaaatgggaagattagggtatgctgggcccacattcccacagggcaccagcagctgggtgggagctactattacccttttggcattcgaggctgctccctgagatcagcgaagcacacagtaggccctcagcaaatctgggcttctcgccctttggtcctcatctctgactttggtccctctttccctgactccctcccctgtgggtgaatggggagggaagagctggagggagaccgcacccctgcactgctcaccagagcctggctctttcccatcccatcttggcagggccctaacccccttgcctcatccccctgcctgcctggtctctccctcttgcccttgcctctgcctttcggcttctccttggctctattaatgcttctcctcactgcccggtgccttttgttttaacagaacccccgcacagtccctgttcagcctgccttctccacggtgccattctcccagtctgtctgtttcccacccaggcccagggggcgcagacaaaaagtgagttcaacacagaggccctgggtggccgagcagacagtaggaaggaccgagggtctgagaggctggccccagccagcaggccactcagggcctacaggccccatcttgcccactcaagagttccctgtctgtctgccgggcacccagagctggggacctgggggtctccctgaattcttcattcccccttctttacgtctctccaaggcaccaagaggcccgaagccaccgacatggcccaggcctccgggattcctcaccatgacgacaggggtccagttccccaccccccacacccaaccactgtcacagtggttcttataagcacttaagttcttataagtgcttcttataagcaaatctgatcacaccctctccctgcttaaaaatcttcacagcccccagcccttcaaataaagcccaaattccccagcagggcatacaaattcctcccagtctgaccccaatcaacctcgctgcctcacccctaaaccacaaagctcacgcagcctctgcagctcactcaaggccctctcgggccaccatgtttttgcatatgctgtccctggtcccggaagcatcctctgccagcctgcccccagcacacgcctaattgcccttccatgctctgcctaaatgtcgctcctctgggagtcctccccgcctggaatattgttggacgctcccccatgaccccacagagtctgtacgtatctgtgccatgccagttcaaagcaccccattgtaactgtgtttgcgttgtctgtccccgtcactccacccccatctccctatgcccatgaggcttcagagggccgggactgtgccttgttcatttgcactcagtgaatgaatgtggaatgtggttcacacagccagggagaatgggataccagccagggcaagaacagtctactgggtggggcaggatccaggacaaggaggtgagcagcccttcctctggccactccagtagtggggactgggaggaggggcgctttgtctatgcagtcttcttacggctcatcacggtacagacagggcacctgcctcctgccacgctgacttcaggactggtcgagccccagggaacatttgcagcgcagcccaaatttggccctggccctggggaggatagaaagtgtgctggatacagtcagacagaactggctgccactttggatttgatgccttccacctgggcgagcttgggcaagttgcttaatctttctaagcctcattacctcaccagggacacaggagctgaggctgcttccctcattggaaagcagtgaaacccaggaatcagccc
